(19) United States
(12) Patent Application Publication
(10) Pub. No.: US 2024/0240182 A1
(43) Pub. Date: Jul. 18, 2024

(54) HUMAN CHROMOSOME 9 OPEN READING FRAME 72 (C9ORF72) iRNA AGENT COMPOSITIONS AND METHODS OF USE THEREOF

(71) Applicants: Alnylam Pharmaceuticals, Inc., Cambridge, MA (US); Regeneron Pharmaceuticals, Inc., Tarrytown, NY (US)

(72) Inventors: Lan Thi Hoang Dang, Arlington, MA (US); James D. McIninch, Burlington, MA (US); Tuyen M. Nguyen, Milton, MA (US); Aarti Sharma-Kanning, Tarrytown, NY (US); David Frendewey, Tarrytown, NY (US); Brittany Savage, Tarrytown, NY (US)

(21) Appl. No.: 18/525,924

(22) Filed: Dec. 1, 2023

Related U.S. Application Data
(63) Continuation of application No. PCT/US2022/031519, filed on May 31, 2022.
(60) Provisional application No. 63/196,791, filed on Jun. 4, 2021.

(51) Int. Cl. C12N 15/113

(52) U.S. Cl. CPC C12N 15/113; C12N 2310/14; C12N 2310/315; C12N 2310/321; C12N 2310/322; C12N 2310/3515

(57) ABSTRACT

The disclosure relates to double stranded ribonucleic acid (dsRNAi) agents and compositions targeting a human chromosome 9 open reading frame 72 (C9orf72) gene, as well as methods of inhibiting expression of a C9orf72 gene and methods of treating subjects having a C9orf72-associated disease or disorder, e.g., C9orf72 amyotrophic lateral sclerosis, frontotemporal dementia or Huntington-Like Syndrome Due To C9orf72 Expansions, using such dsRNAi agents and compositions.

### RELATED APPLICATIONS

[0001] This application is a 35 § U.S.C. 111(a) continuation application which claims the benefit of priority to PCT/US2022/031519, filed on May 31, 2022, which, in turn, claims the benefit of priority to U.S. Provisional Application No. 63/196,791, filed on Jun. 4, 2021. The entire contents of each of the foregoing applications are incorporated herein by reference.

### SEQUENCE LISTING

[0002] The instant application contains a Sequence Listing which has been submitted electronically in XML file format and is hereby incorporated by reference in its entirety. Said XML copy, created on Mar. 8, 2024, is named 121301_14502_SL.xml and is 8.544,874 bytes in size.

### BACKGROUND OF THE INVENTION

[0003] Human chromosome 9 open reading frame 72 (C9orf72) is a protein encoded by the c9orf72 gene. C9orf72 is found in many regions of the brain, such as the cerebral cortex, in the cytoplasm of astrocytes and neurons as well as in presynaptic terminals.

[0004] Differential use of transcription alternative start and termination sites generates three sense RNA transcripts from C9orf72 DNA. These encode two protein isoforms consisting of a long isoform (isoform A) of approximately 54 kDa derived from variants 2 (NM_018325.4) and 3 (NM_001256054.2), and a short isoform (isoform B) of approximately 24 kDa derived from variant 1 (NM_145005.6) (see, e.g., FIG. 1 of Barker, et al. (2017) Frontiers Cell Neurosci 11:1-15). In addition to the sense RNA transcripts from C9orf72 DNA, there are repeat-containing antisense RNA transcripts, which have been shown to be elevated in the brains of C9orf72 expansion-positive patients. There are also non-repeat-containing sense and antisense RNA transcripts depending on the location of the transcriptional start site.

[0005] The two alternatively used first exons of the C9orf72 gene are exons 1a and 1b (see, e.g., FIG. 1 of Barker, et al., supra). A large GGGGCC (G+C2) hexanucleotide repeat expansion (SEQ ID NO: 100) (from about 2-22 copies to 700-1600 copies) in the first intron of the C9orf72 gene between exons 1a and 1b has been shown to 1) interfere with the transcription of the non-repeat containing C9orf72 mRNA, thus decreasing the mRNA and protein levels of C9orf72, 2) generate toxic dipeptide repeat proteins through RAN-initiated translation as well as 3) generate nuclear and cytoplasmic RNA foci, both of which may be pathogenic and result in several neurodegenerative diseases with distinct clinical features but common pathological features and genetic causes (Ling, et al. (2013) Neuron 79:416-438). Furthermore, the repeat-containing antisense RNA transcripts have been shown to accumulate in nuclear and cytoplasmic RNA foci, as well as contribute to the expression of antisense toxic dipeptide repeat proteins through RAN-initiated translation. In particular, the presence of a hexanucleotide repeat expansion in the C9orf72 gene is the most common genetic cause of familial and sporadic Amyotrophic lateral sclerosis (ALS), a devastating degenerative disease of motor neurons in the brain and spinal cord. Indeed, C9orf72 mutation hexanucleotide repeat expansions are present in approximately 40% of familial ALS and 8-10% of sporadic ALS subjects. Hexanucleotide repeat expansion in the C9orf72 gene is also the most common familial cause of Frontotemporal Dementia (FTD), the second most common form of presenile dementia after Alzheimer's disease which is characterized by behavioral and language deficits and manifests pathologically by neuronal atrophy in the frontal and anterior temporal lobes in the brain. Huntington-Like Syndrome Due To C9orf72 Expansions, characterized by movement disorders, including dystonia, chorea, myoclonus, tremor and rigidity, cognitive and memory impairment, carly psychiatric disturbances and behavioral problems, is also associated with hexanucleotide repeat expansion in the C9orf72 gene.

[0006] Although the functions of the C9orf72 protein are still being investigated, C9orf72 has been shown to interact with and activate Rab proteins that are involved in regulating the cytoskeleton, autophagy and endocytic transport. In addition, numerous cellular pathways have been demonstrated to be misregulated in neurodegenerative diseases associated with C9orf72 hexanucleotide repeat expansion. For example, altered RNA processing has consistently appeared at the forefront of research into C9orf72 disease. This includes bidirectional transcription of the repeat sequence, accumulation of repeat RNA into nuclear foci sequestering specific RNA-binding proteins (RBPs) and translation of RNA repeats into dipeptide repeat proteins (DPRs) by repeat-associated non-AUG (RAN)-initiated translation. Additionally, disruptions in release of the C9orf72 RNA from RNA polymerase II, translation in the cytoplasm and degradation have been shown to be disrupted by C9orf72 hexanucleotide repeat expansion. Furthermore, several alterations have been identified in the processing of the C9orf72 RNA itself, in terms of its transcription, splicing and localization (see, e.g., Barker, et al., supra).

[0007] Irrespective of the mechanism, several groups have identified the presence of sense and antisense C9orf72-containing foci as well as the presence of aberrant dipeptide-repeat (DPR) proteins (poly(GA), poly(GR), poly(GP), poly(PA), and poly(PR)) produced from all reading frames of either sense or antisense repeat-containing C9orf72 RNAs through repeat-associated non-AUG-dependent (RAN) translation in several cell types in the nervous systems of subjects having a C9orf72-associated disease (Lagier-Tourenne, et al. (2013) Proc Natl Acad Sci USA doi/10.1073/pnas. 1318835110; Jiang, et al. (2016) Neuron 90:535-550). Furthermore, in mice with one allele of C9orf72 inactivated no disease was observed but, in mice with both C9orf72 alleles inactivated, splenomegaly, enlarged lymph nodes, and mild social interaction deficits, but no motor dysfunction was observed. In addition, in mice expressing human C9orf72 RNAs with up to 450 GGGGCC repeats (SEQ ID NO: 101) it was shown that hexanucleotide expansions caused age-, repeat-length-, and expression- level-dependent accumulation of sense and antisense RNA-containing foci and dipeptide-repeat proteins synthesized by AUG-independent translation, accompanied by loss of hippocampal neurons, increased anxiety, and impaired cognitive function (Jiang, et al. (2016) Neuron 90:535-550).

[0008] There is currently no cure for subjects having a C9orf72-associated disease, e.g., C9orf72 amyotrophic lateral sclerosis, C9orf72 frontotemporal dementia or Huntington's disease, e.g., Huntington-Like Syndrome Due To C9orf72 Expansions, parkinsonism, olivopontocerebellar degeneration, corticobasal syndrome, or Alzheimer's disease, and treatments are only aimed at alleviating the symptoms and improving the patient's quality of life as the disease progresses.

[0009] Accordingly, there is a need in the art for agents that can selectively and efficiently inhibit the expression of the C9orf72 gene, e.g., hexanucleotide-repeat-containing C9orf72 RNAs, for, e.g., the treatment of subjects having a C9orf72-associated disorder.

### BRIEF SUMMARY OF THE INVENTION

[0010] The present disclosure provides iRNA compositions, which effect the RNA-induced silencing complex (RISC)-mediated cleavage of RNA transcripts of a C9orf72 gene, such as a C9orf72 gene having an expanded GGGGCC (G+C2) repeat (SEQ ID NO: 100). The C9orf72 RNA transcript may be within a cell, e.g., a cell within a subject, such as a human. The use of these iRNAs enables the targeted degradation of one or more RNAs of the corresponding gene (C9orf72 gene) in mammals. The iRNAs of the invention have been designed to target a C9orf72 gene transcript, e.g., a C9orf72 gene transcript having an expanded GGGGCC hexanucleotide repeat (SEQ ID NO: 100) in an intron of the gene. The agents may target a mature C9orf72 mRNA (an mRNA having introns spliced out) or a sense or antisense C9orf72 RNA containing a hexanucleotide-repeat (e.g., an RNA containing C9orf72 intron 1A). The described iRNAs may have one or more nucleotide modifications or combination of nucleotide modifications that increase activity, delivery, and/or stability of the İRNAs.

[0011] The agents may target a sense strand of a mature C9orf72 mRNA (an mRNA having introns spliced out) or a sense or antisense strand of a C9orf72 RNA containing a hexanucleotide-repeat (an RNA containing C9orf72 intron 1A). In certain aspects of the invention, the RNAi agents of the disclosure may target a C9orf72 sense and/or antisense RNA transcript containing a hexanucleotide-repeat (an RNA containing C9orf72 intron 1A). Targeting a C9orf72 sense and/or antisense strand RNA containing a hexanucleotide-repeat can inhibit expression of, or reduce the presence of, aberrant dipeptide-repeat (DPR) proteins (poly(GA), poly(GR), poly(GP), poly(PA), and poly(PR)), which are produced from all reading frames of either sense or antisense repeat-containing C9orf72 RNAs through repeat-associated non-AUG-dependent (RAN) translation, in cells of the nervous systems of subjects having a C9orf72-associated disease. In some embodiments, a combination of an RNA agent targeting a C9orf72 sense strand RNA containing a hexanucleotide-repeat and an RNA agent targeting a C9orf72 antisense strand RNA containing a hexanucleotide-repeat are provided together.

[0012] The iRNAs of the invention may decrease the levels of C9orf72 mature mRNA less than they decrease the levels of C9orf72 RNA containing a hexanucleotide repeat. For example, the iRNAs of the invention may decrease the levels of the C9orf72 mature mRNA by no more than about 50%, and reduce the level of sense- and antisense-containing C9orf72 RNA foci, reduce the levels of one or more aberrant dipeptide-repeat (DPR) proteins (poly(GA), poly(GR), poly(GP), poly(PA), and poly(PR)), and/or decrease the levels of C9orf72 sense and/or antisense RNA containing a hexanucleotide-repeat by more than about 50%. Without intending to be limited by theory, it is believed that a combination or sub-combination of the foregoing properties and the specific target sites, or the specific modifications in these iRNAs confer to the iRNAs of the invention improved efficacy, stability, potency, durability, and safety.

[0013] In one aspect, the present invention provides double stranded ribonucleic acid (dsRNA) agents for knocking down a C9orf72 target RNA in a cell.

[0014] In one embodiment, the dsRNA agents target a region of a C9orf72 target RNA containing a hexanucleotide repeat, e.g., multiple contiguous copies of a GGGGCC (SEQ ID NO: 100) or CCCCGG hexanucleotide repeat. In some embodiments, the C9orf72 target RNA can be a sense C9orf72 RNA containing a hexanucleotide repeat, an antisense C9orf72 target RNA containing a hexanucleotide repeat, or a combination of a sense C9orf72 RNA containing a hexanucleotide repeat and an antisense C9orf72 target RNA containing a hexanucleotide repeat.

[0015] In one aspect, the present invention provides a double stranded ribonucleic acid (dsRNA) agent for inhibiting expression of C9orf72, wherein the dsRNA agent comprises a sense strand and an antisense strand forming a double stranded region, wherein the sense strand comprises at least 15, e.g., 15, 16, 17, 18, 19, 20, 21, 22, or 23, contiguous nucleotides differing by no more than 3, e.g., 3, 2, 1, or 0, nucleotides from the nucleotide sequence of SEQ ID NO: 13 and the antisense strand comprises a nucleotide sequence comprising at least 15, e.g., 15, 16, 17, 18, 19, 20, 21, 22, or 23, contiguous nucleotides differing by no more than 3 nucleotides from the corresponding portion of the nucleotide sequence of SEQ ID NO: 14; and wherein the sense strand or the antisense strand or both the sense strand and the antisense strand comprises at least one modified nucleotide.

[0016] In one aspect, the present invention provides a double stranded ribonucleic acid (dsRNA) agent for inhibiting expression of C9orf72, wherein the dsRNA agent comprises a sense strand and an antisense strand forming a double stranded region, wherein the sense strand comprises at least 15, e.g., 15, 16, 17, 18, 19, 20, 21, 22, or 23, contiguous nucleotides differing by no more than 3, e.g., 3, 2, 1, or 0, nucleotides from the nucleotide sequence of SEQ ID NO: 17, and the antisense strand comprises a nucleotide sequence comprising at least 15, e.g., 15, 16, 17, 18, 19, 20, 21, 22, or 23, contiguous nucleotides differing by no more than 3 nucleotides from the corresponding portion of the nucleotide sequence of SEQ ID NO: 18; and wherein the sense strand or the antisense strand or both the sense strand and the antisense strand comprises at least one modified nucleotide.

[0017] In one aspect, the present invention provides a double stranded ribonucleic acid (dsRNA) agent for inhibiting expression of C9orf72, wherein the dsRNA agent comprises a sense strand and an antisense strand forming a double stranded region, wherein the sense strand comprises at least 15, e.g., 15, 16, 17, 18, 19, 20, 21, 22, or 23, contiguous nucleotides differing by no more than 3, e.g., 3, 2, 1, or 0, nucleotides from the nucleotide sequence of SEQ ID NO: 19, and the antisense strand comprises a nucleotide sequence comprising at least 15, e.g., 15, 16, 17, 18, 19, 20, 21, 22, or 23, contiguous nucleotides differing by no more than 3 nucleotides from the corresponding portion of the nucleotide sequence of SEQ ID NO:20; and wherein the sense strand or the antisense strand or both the sense strand and the antisense strand comprises at least one modified nucleotide.

[0018] In one embodiment, an RNAi agent of the disclosure targets a C9orf72 antisense RNA transcript in a region between the antisense RNA transcript start site and the 5′ end of exon 1B. In another embodiment, an RNAi agent of the disclosure targets a C9orf72 antisense RNA transcript in a region between the antisense RNA transcript start site and the hexanucleotide repeat. In another embodiment, an RNAi agent of the disclosure targets a C9orf72 antisense RNA transcript in a region between the antisense RNA transcript start site and the 3′ end of exon 1A. In another embodiment, an RNAi agent of the disclosure targets a C9orf72 antisense RNA transcript in a region between the antisense RNA transcript start site and the 5′ end of exon 1A. In another embodiment, an RNAi agent of the disclosure targets a C9orf72 antisense RNA transcript in a region between the antisense RNA transcript start site and 500 bases upstream of the 5′ end of exon 1A. In another embodiment, an RNAi agent of the disclosure targets a C9orf72 antisense RNA transcript in a region between the antisense RNA transcript start site and 1000 bases upstream of the 5′ end of exon 1A. In another embodiment, an RNAi agent of the disclosure targets a C9orf72 antisense RNA transcript in a region between the antisense RNA transcript start site and 1500 bases upstream of the 5′ end of exon 1A. In another embodiment, an RNAi agent of the disclosure targets a C9orf72 antisense RNA transcript in a region between the antisense RNA transcript start site and 2000 bases upstream of the 5′ end of exon 1A.

[0019] In another embodiment, an RNAi agent of the disclosure targets a C9orf72 antisense RNA transcript in a region between the 5′ end of exon 1B and the hexanucleotide repeat. In another embodiment, an RNAi agent of the disclosure targets a C9orf72 antisense RNA transcript in a region between the 5′ end of exon 1B and the 3′ end of exon 1A. In another embodiment, an RNAi agent of the disclosure targets a C9orf72 antisense RNA transcript in a region between the 5′ end of exon 1B and the 5′ end of exon 1A. In another embodiment, an RNAi agent of the disclosure targets a C9orf72 antisense RNA transcript in a region between the 5′ end of exon 1B and 500 bases upstream of the 5′ end of exon 1A. In another embodiment, an RNAi agent of the disclosure targets a C9orf72 antisense RNA transcript in a region between the 5′ end of exon 1B and 1000 bases upstream of the 5′ end of exon 1A. In another embodiment, an RNAi agent of the disclosure targets a C9orf72 antisense RNA transcript in a region between the 5′ end of exon 1B and 1500 bases upstream of the 5′ end of exon 1A. In another embodiment, an RNAi agent of the disclosure targets a C9orf72 antisense RNA transcript in a region between the 5′ end of exon 1B and 2000 bases upstream of the 5′ end of exon 1A.

[0020] In another embodiment, an RNAi agent of the disclosure targets a C9orf72 antisense RNA transcript in a region between the hexanucleotide repeat and the 3′ end of exon 1A. In another embodiment, an RNAi agent of the disclosure targets a C9orf72 antisense RNA transcript in a region between the hexanucleotide repeat and the 5′ end of exon 1A. In another embodiment, an RNAi agent of the disclosure targets a C9orf72 antisense RNA transcript in a region between the hexanucleotide repeat and 500 bases upstream of the 5′ end of exon 1A. In another embodiment, an RNAi agent of the disclosure targets a C9orf72 antisense RNA transcript in a region between the hexanucleotide repeat and 1000 bases upstream of the 5′ end of exon 1A. In another embodiment, an RNAi agent of the disclosure targets a C9orf72 antisense RNA transcript in a region between the hexanucleotide repeat and 1500 bases upstream of the 5′ end of exon 1A. In another embodiment, an RNAi agent of the disclosure targets a C9orf72 antisense RNA transcript in a region between the hexanucleotide repeat and 2000 bases upstream of the 5′ end of exon 1A.

[0021] In one aspect, the present invention provides a double stranded ribonucleic acid (dsRNA) agent for inhibiting expression of C9orf72, wherein the dsRNA agent comprises a sense strand and an antisense strand forming a double stranded region, wherein the sense strand comprises a nucleotide sequence comprising at least 15, e.g., 15, 16, 17, 18, 19, 20, 21, 22, or 23, contiguous nucleotides differing by no more than 3 nucleotides from an mRNA target sequence of any one of Tables 4A-4G and 7A-7E; and the antisense strand comprises at least 15, e.g., 15, 16, 17, 18, 19, 20, 21, 22, or 23, contiguous nucleotides differing by no more than 3, e.g., 3, 2, 1, or 0, nucleotides from the complement of the corresponding mRNA target sequence of any one of Tables 4A-4G and 7A-7E.

[0022] In certain embodiments, the sense strand or the antisense strand or both the sense strand and the antisense strand is conjugated to one or more lipophilic moieties.

[0023] In one aspect, the present invention provides a combination of:
[0024] a) a double stranded ribonucleic acid (dsRNA) agent for inhibiting expression of C9orf72. wherein the dsRNA agent comprises a sense strand and an antisense strand forming a double stranded region, wherein the sense strand comprises a nucleotide sequence comprising at least 15, e.g., 15, 16, 17, 18, 19, 20, 21, 22, or 23, contiguous nucleotides differing by no more than 3 nucleotides from an mRNA target sequence of any one of Tables 4A-4G; and the antisense strand comprises at least 15, e.g., 15, 16, 17, 18, 19, 20, 21, 22, or 23, contiguous nucleotides differing by no more than 3, e.g., 3, 2, 1, or 0, nucleotides from the complement of the corresponding mRNA target sequence of any one of Tables 4A-4G; and
[0025] b) a double stranded ribonucleic acid (dsRNA) agent for inhibiting expression of C9orf72. wherein the dsRNA agent comprises a sense strand and an antisense strand forming a double stranded region, wherein the sense strand comprises a nucleotide sequence comprising at least 15, e.g., 15, 16, 17, 18, 19, 20, 21, 22, or 23, contiguous nucleotides differing by no more than 3 nucleotides from an mRNA target sequence of any one of Tables 7A-7E; and the antisense strand comprises at least 15. e.g., 15, 16, 17, 18, 19, 20, 21, 22, or 23, contiguous nucleotides differing by no more than 3, e.g., 3, 2, 1, or 0, nucleotides from the complement of the corresponding mRNA target sequence of any one of Tables 7A-7E.

[0026] In certain embodiments, the sense strand or the antisense strand or both the sense strand and the antisense strand is conjugated to one or more lipophilic moieties.

[0027] In one aspect, the present invention provides a combination of:
[0028] a) a dsRNA agent for inhibiting expression of a C9orf72 antisense strand transcript, wherein the dsRNA agent comprises a sense strand and an antisense strand forming a double stranded region, wherein the antisense strand comprises a nucleotide sequence comprising at least 15 contiguous nucleotides differing by no more than 3 nucleotides from the complement of SEQ ID NO: 21; and
[0029] b) a dsRNA agent for inhibiting expression of a C9orf72 sense strand transcript, wherein the dsRNA agent comprises a sense strand and an antisense strand forming a double stranded region. wherein the antisense strand comprises at least 15, e.g., 15, 16, 17, 18, 19, 20, 21, 22, or 23, contiguous nucleotides differing by no more than 3, e.g., 3, 2, 1, or 0, nucleotides from the complement of the any of the mRNA target sequence of any one of Tables 7A-7E.

[0030] In one aspect, the present invention provides a combination of:
[0031] a) a dsRNA agent for inhibiting expression of a C9orf72 antisense strand transcript, wherein the dsRNA agent comprises a sense strand and an antisense strand forming a double stranded region, wherein the antisense strand comprises a nucleotide sequence comprising at least 15 contiguous nucleotides differing by no more than 3 nucleotides from the complement of SEQ ID NO: 22; and
[0032] b) a dsRNA agent for inhibiting expression of a C9orf72 sense strand transcript, wherein the dsRNA agent comprises a sense strand and an antisense strand forming a double stranded region, wherein the antisense strand comprises at least 15, e.g., 15, 16, 17, 18, 19, 20, 21, 22, or 23, contiguous nucleotides differing by no more than 3, e.g., 3, 2, 1, or 0, nucleotides from the complement of the any of the mRNA target sequence of any one of Tables 7A-7E.

[0033] In one aspect, the present invention provides a combination of:
[0034] a) a dsRNA agent for inhibiting expression of a C9orf72 antisense strand transcript, wherein the dsRNA agent comprises a sense strand and an antisense strand forming a double stranded region, wherein the antisense strand comprises a nucleotide sequence comprising at least 15 contiguous nucleotides differing by no more than 3 nucleotides from the complement of SEQ ID NO: 23; and
[0035] b) a dsRNA agent for inhibiting expression of a C9orf72 sense strand transcript, wherein the dsRNA agent comprises a sense strand and an antisense strand forming a double stranded region, wherein the antisense strand comprises at least 15, e.g., 15, 16, 17, 18, 19, 20, 21, 22, or 23, contiguous nucleotides differing by no more than 3, e.g., 3, 2, 1, or 0, nucleotides from the complement of the any of the mRNA target sequence of any one of Tables 7A-7E.

[0036] In one aspect, the present invention provides a combination of:
[0037] a) a dsRNA agent for inhibiting expression of a C9orf72 antisense strand transcript, wherein the dsRNA agent comprises a sense strand and an antisense strand forming a double stranded region, wherein the antisense strand comprises a nucleotide sequence comprising at least 15 contiguous nucleotides differing by no more than 3 nucleotides from the complement of SEQ ID NO: 24; and
[0038] b) a dsRNA agent for inhibiting expression of a C9orf72 sense strand transcript, wherein the dsRNA agent comprises a sense strand and an antisense strand forming a double stranded region. wherein the antisense strand comprises at least 15, e.g., 15, 16, 17, 18, 19, 20, 21, 22, or 23, contiguous nucleotides differing by no more than 3, e.g., 3, 2, 1, or 0, nucleotides from the complement of the any of the mRNA target sequence of any one of Tables 7A-7E.

[0039] In one aspect, the present invention provides a combination of:
[0040] a) a dsRNA agent for inhibiting expression of a C9orf72 antisense strand transcript, wherein the dsRNA agent comprises a sense strand and an antisense strand forming a double stranded region, wherein the antisense strand comprises a nucleotide sequence comprising at least 15 contiguous nucleotides differing by no more than 3 nucleotides from the complement of SEQ ID NO: 25; and
[0041] b) a dsRNA agent for inhibiting expression of a C9orf72 sense strand transcript, wherein the dsRNA agent comprises a sense strand and an antisense strand forming a double stranded region. wherein the antisense strand comprises at least 15, e.g., 15, 16, 17, 18, 19, 20, 21, 22, or 23, contiguous nucleotides differing by no more than 3, e.g., 3, 2, 1, or 0, nucleotides from the complement of the any of the mRNA target sequence of any one of Tables 7A-7E.

[0042] In one aspect, the present invention provides a combination of:
[0043] a) a dsRNA agent for inhibiting expression of a C9orf72 antisense strand transcript, wherein the dsRNA agent comprises a sense strand and an antisense strand forming a double stranded region. wherein the antisense strand comprises a nucleotide sequence comprising at least 15 contiguous nucleotides differing by no more than 3 nucleotides from the complement of SEQ ID NO: 26; and
[0044] b) a dsRNA agent for inhibiting expression of a C9orf72 sense strand transcript, wherein the dsRNA agent comprises a sense strand and an antisense strand forming a double stranded region, wherein the antisense strand comprises at least 15, e.g., 15, 16, 17, 18, 19, 20, 21, 22, or 23, contiguous nucleotides differing by no more than 3, e.g., 3, 2, 1, or 0, nucleotides from the complement of the any of the mRNA target sequence of any one of Tables 7A-7E.

[0045] In one aspect, the present invention provides a combination of:
[0046] a) a dsRNA agent for inhibiting expression of a C9orf72 sense strand transcript, wherein the dsRNA agent comprises a sense strand and an antisense strand forming a double stranded region, wherein the antisense strand comprises a nucleotide sequence comprising at least 15 contiguous nucleotides differing by no more than 3 nucleotides from the complement of SEQ ID NO: 51; and
[0047] b) a dsRNA agent for inhibiting expression of a C9orf72 antisense strand transcript, wherein the dsRNA agent comprises a sense strand and an antisense strand forming a double stranded region, wherein the antisense strand comprises at least 15, e.g., 15, 16, 17, 18, 19, 20, 21, 22, or 23, contiguous nucleotides differing by no more than 3, e.g., 3, 2, 1, or 0, nucleotides from the complement of the any of the mRNA target sequence of any one of Tables 4A-4G.

[0048] In one aspect, the present invention provides a combination of:
[0049] a) a dsRNA agent for inhibiting expression of a C9orf72 sense strand transcript, wherein the dsRNA agent comprises a sense strand and an antisense strand forming a double stranded region, wherein the antisense strand comprises a nucleotide sequence comprising at least 15 contiguous nucleotides differing by no more than 3 nucleotides from the complement of SEQ ID NO: 52; and
[0050] b) a dsRNA agent for inhibiting expression of a C9orf72 antisense strand transcript, wherein the dsRNA agent comprises a sense strand and an antisense strand forming a double stranded region. wherein the antisense strand comprises at least 15, e.g., 15, 16, 17, 18, 19, 20, 21, 22, or 23, contiguous nucleotides differing by no more than 3, e.g., 3, 2. 1, or 0, nucleotides from the complement of the any of the mRNA target sequence of any one of Tables 4A-4G.

[0051] In one aspect, the present invention provides a combination of:
[0052] a) a dsRNA agent for inhibiting expression of a C9orf72 sense strand transcript, wherein the dsRNA agent comprises a sense strand and an antisense strand forming a double stranded region. wherein the antisense strand comprises a nucleotide sequence comprising at least 15 contiguous nucleotides differing by no more than 3 nucleotides from the complement of SEQ ID NO: 53; and
[0053] b) a dsRNA agent for inhibiting expression of a C9orf72 antisense strand transcript, wherein the dsRNA agent comprises a sense strand and an antisense strand forming a double stranded region, wherein the antisense strand comprises at least 15, e.g., 15, 16, 17, 18, 19, 20, 21, 22, or 23, contiguous nucleotides differing by no more than 3, e.g., 3, 2, 1, or 0, nucleotides from the complement of the any of the mRNA target sequence of any one of Tables 4A-4G.

[0054] In one aspect, the present invention provides a combination of:
[0055] a) a dsRNA agent for inhibiting expression of a C9orf72 sense strand transcript, wherein the dsRNA agent comprises a sense strand and an antisense strand forming a double stranded region, wherein the antisense strand comprises a nucleotide sequence comprising at least 15 contiguous nucleotides differing by no more than 3 nucleotides from the complement of SEQ ID NO: 54; and
[0056] b) a dsRNA agent for inhibiting expression of a C9orf72 antisense strand transcript, wherein the dsRNA agent comprises a sense strand and an antisense strand forming a double stranded region, wherein the antisense strand comprises at least 15, e.g., 15, 16, 17, 18, 19, 20, 21, 22, or 23, contiguous nucleotides differing by no more than 3, e.g., 3, 2, 1, or 0, nucleotides from the complement of the any of the mRNA target sequence of any one of Tables 4A-4G.

[0057] In one aspect, the present invention provides a combination of:
[0058] a) a dsRNA agent for inhibiting expression of a C9orf72 sense strand transcript, wherein the dsRNA agent comprises a sense strand and an antisense strand forming a double stranded region. wherein the antisense strand comprises a nucleotide sequence comprising at least 15 contiguous nucleotides differing by no more than 3 nucleotides from the complement of SEQ ID NO: 55; and
[0059] b) a dsRNA agent for inhibiting expression of a C9orf72 antisense strand transcript, wherein the dsRNA agent comprises a sense strand and an antisense strand forming a double stranded region, wherein the antisense strand comprises at least 15, e.g., 15, 16, 17, 18, 19, 20, 21, 22, or 23, contiguous nucleotides differing by no more than 3, e.g., 3, 2, 1, or 0, nucleotides from the complement of the any of the mRNA target sequence of any one of Tables 4a-4g.

[0060] In one aspect, the present invention provides a combination of:
[0061] a) a dsRNA agent for inhibiting expression of a C9orf72 sense strand transcript, wherein the dsRNA agent comprises a sense strand and an antisense strand forming a double stranded region, wherein the antisense strand comprises a nucleotide sequence comprising at least 15 contiguous nucleotides differing by no more than 3 nucleotides from the complement of SEQ ID NO: 56; and
[0062] b) a dsRNA agent for inhibiting expression of a C9orf72 antisense strand transcript, wherein the dsRNA agent comprises a sense strand and an antisense strand forming a double stranded region. wherein the antisense strand comprises at least 15, e.g., 15, 16, 17, 18, 19, 20, 21, 22, or 23, contiguous nucleotides differing by no more than 3, e.g., 3, 2, 1, or 0, nucleotides from the complement of the any of the mRNA target sequence of any one of Tables 4A-4G.

[0063] In one aspect, the present invention provides a combination of:
[0064] a) a dsRNA agent for inhibiting expression of a C9orf72 sense strand transcript, wherein the dsRNA agent comprises a sense strand and an antisense strand forming a double stranded region. wherein the antisense strand comprises a nucleotide sequence comprising at least 15 contiguous nucleotides differing by no more than 3 nucleotides from the complement of SEQ ID NO: 57; and
[0065] b) a dsRNA agent for inhibiting expression of a C9orf72 antisense strand transcript, wherein the dsRNA agent comprises a sense strand and an antisense strand forming a double stranded region, wherein the antisense strand comprises at least 15, e.g., 15, 16, 17, 18, 19, 20, 21, 22, or 23, contiguous nucleotides differing by no more than 3, e.g., 3, 2, 1, or 0, nucleotides from the complement of the any of the mRNA target sequence of any one of Tables 4A-4G.

[0066] In one aspect, the present invention provides a combination of:
[0067] a) a dsRNA agent for inhibiting expression of a C9orf72 sense strand transcript, wherein the dsRNA agent comprises a sense strand and an antisense strand forming a double stranded region, wherein the antisense strand comprises a nucleotide sequence comprising at least 15 contiguous nucleotides differing by no more than 3 nucleotides from the complement of SEQ ID NO: 58; and
[0068] b) a dsRNA agent for inhibiting expression of a C9orf72 antisense strand transcript, wherein the dsRNA agent comprises a sense strand and an antisense strand forming a double stranded region, wherein the antisense strand comprises at least 15, e.g., 15, 16, 17, 18, 19, 20, 21, 22, or 23, contiguous nucleotides differing by no more than 3, e.g., 3, 2, 1, or 0, nucleotides from the complement of the any of the mRNA target sequence of any one of Tables 4A-4G.

[0069] In one aspect, the present invention provides a combination of:
[0070] a) a dsRNA agent for inhibiting expression of a C9orf72 sense strand transcript, wherein the dsRNA agent comprises a sense strand and an antisense strand forming a double stranded region, wherein the antisense strand comprises a nucleotide sequence comprising at least 15 contiguous nucleotides differing by no more than 3 nucleotides from the complement of SEQ ID NO: 59; and
[0071] b) a dsRNA agent for inhibiting expression of a C9orf72 antisense strand transcript, wherein the dsRNA agent comprises a sense strand and an antisense strand forming a double stranded region, wherein the antisense strand comprises at least 15, e.g., 15, 16, 17, 18, 19, 20, 21, 22, or 23, contiguous nucleotides differing by no more than 3, e.g., 3, 2, 1, or 0, nucleotides from the complement of the any of the mRNA target sequence of any one of Tables 4A-4G.

[0072] In one aspect, the present invention provides a combination of:
[0073] a) a dsRNA agent for inhibiting expression of a C9orf72 sense strand transcript, wherein the dsRNA agent comprises a sense strand and an antisense strand forming a double stranded region, wherein the antisense strand comprises a nucleotide sequence comprising at least 15 contiguous nucleotides differing by no more than 3 nucleotides from the complement of SEQ ID NO: 60; and
[0074] b) a dsRNA agent for inhibiting expression of a C9orf72 antisense strand transcript, wherein the dsRNA agent comprises a sense strand and an antisense strand forming a double stranded region, wherein the antisense strand comprises at least 15, e.g., 15, 16, 17, 18, 19, 20, 21, 22, or 23, contiguous nucleotides differing by no more than 3, e.g., 3, 2, 1, or 0, nucleotides from the complement of the any of the mRNA target sequence of any one of Tables 4A-4G.

[0075] In one aspect, the present invention provides a combination of:
[0076] a) a dsRNA agent for inhibiting expression of a C9orf72 sense strand transcript, wherein the dsRNA agent comprises a sense strand and an antisense strand forming a double stranded region, wherein the antisense strand comprises a nucleotide sequence comprising at least 15 contiguous nucleotides differing by no more than 3 nucleotides from the complement of SEQ ID NO: 61; and
[0077] b) dsRNA agent for inhibiting expression of a C9orf72 antisense strand transcript, wherein the dsRNA agent comprises a sense strand and an antisense strand forming a double stranded region, wherein the antisense strand comprises at least 15, e.g., 15, 16, 17, 18, 19, 20, 21, 22, or 23, contiguous nucleotides differing by no more than 3, e.g., 3, 2. 1, or 0, nucleotides from the complement of the any of the mRNA target sequence of any one of Tables 4A-4G.

[0078] In one aspect, the present invention provides a combination of:
[0079] a) dsRNA agent for inhibiting expression of a C9orf72 sense strand transcript, wherein the dsRNA agent comprises a sense strand and an antisense strand forming a double stranded region, wherein the antisense strand comprises a nucleotide sequence comprising at least 15 contiguous nucleotides differing by no more than 3 nucleotides from the complement of SEQ ID NO: 62; and
[0080] b) dsRNA agent for inhibiting expression of a C9orf72 antisense strand transcript, wherein the dsRNA agent comprises a sense strand and an antisense strand forming a double stranded region, wherein the antisense strand comprises at least 15, e.g., 15, 16, 17, 18, 19, 20, 21, 22, or 23, contiguous nucleotides differing by no more than 3, e.g., 3, 2, 1, or 0, nucleotides from the complement of the any of the mRNA target sequence of any one of Tables 4A-4G.

[0081] In one aspect, the present invention provides a combination of a first dsRNA agent targeting a C9orf72 antisense RNA transcript and a second dsRNA agent targeting a C9orf72 sense strand transcript wherein,
[0082] a) the first dsRNA agent comprises an antisense strand comprising a nucleotide sequence comprising at least 15 contiguous nucleotides differing by no more than 3 nucleotides from the antisense sequence of AD-1446213; and the second dsRNA agent comprises an antisense strand comprising a nucleotide sequence comprising at least 15 contiguous nucleotides differing by no more than 3 nucleotides from the antisense sequence of AD-1285238;
[0083] b) the first dsRNA agent comprises an antisense strand comprising a nucleotide sequence comprising at least 15 contiguous nucleotides differing by no more than 3 nucleotides from the antisense sequence of AD-1446213; and the second dsRNA agent comprises an antisense strand comprising a nucleotide sequence comprising at least 15 contiguous nucleotides differing by no more than 3 nucleotides from the antisense sequence of AD-1285234;
[0084] c) the first dsRNA agent comprises an antisense strand comprising a nucleotide sequence comprising at least 15 contiguous nucleotides differing by no more than 3 nucleotides from the antisense sequence of AD-1446246; and the second dsRNA agent comprises an antisense strand comprising a nucleotide sequence comprising at least 15 contiguous nucleotides differing by no more than 3 nucleotides from the antisense sequence of AD-1285238;
[0085] d) the first dsRNA agent comprises an antisense strand comprising a nucleotide sequence comprising at least 15 contiguous nucleotides differing by no more than 3 nucleotides from the antisense sequence of AD-1446246; and the second dsRNA agent comprises an antisense strand comprising a nucleotide sequence comprising at least 15 contiguous nucleotides differing by no more than 3 nucleotides from the antisense sequence of AD-1285234;
[0086] e) the first dsRNA agent comprises an antisense strand comprising a nucleotide sequence comprising at least 15 contiguous nucleotides differing by no more than 3 nucleotides from the antisense sequence of AD-1446268; and the second dsRNA agent comprises an antisense strand comprising a nucleotide sequence comprising at least 15 contiguous nucleotides differing by no more than 3 nucleotides from the antisense sequence of AD-1285238;
[0087] f) the first dsRNA agent comprises an antisense strand comprising a nucleotide sequence comprising at least 15 contiguous nucleotides differing by no more than 3 nucleotides from the antisense sequence of AD-1446268; and the second dsRNA agent comprises an antisense strand comprising a nucleotide sequence comprising at least 15 contiguous nucleotides differing by no more than 3 nucleotides from the antisense sequence of AD-1285234.

[0088] In another aspect, the present invention provides a double stranded ribonucleic acid (dsRNA) agent for inhibiting expression of C9orf72, wherein the dsRNA agent comprises a sense strand and an antisense strand forming a double stranded region, wherein the sense strand or the antisense strand is a sense strand or an antisense strand selected from the group consisting of any of the sense strands and antisense strands in any one of Tables 2, 3, 10A, 10C, 11, and 12; and wherein the sense strand, the antisense strand, or both the sense strand and the antisense strand comprises at least one modified nucleotide.

[0089] In another aspect, the present invention provides a double stranded ribonucleic acid (dsRNA) agent for inhibiting expression of C9orf72, wherein the dsRNA agent comprises a sense strand and an antisense strand forming a double stranded region, wherein the sense strand comprises at least 15 contiguous nucleotides differing by no more than three nucleotides from nucleotides 27573296-27573318; 27573314-27573336; 27573319-27573341; 27573562-27573584; 27573585-27573607; 27573592-27573614; 27573599-27573621; 27573608-27573630; 27573616-27573638; 27573619-27573641; 27573622-27573644; 27573633-27573655; 27573690-27573712; or 27573717-27573739 of SEQ ID NO: 13; and wherein the sense strand, the antisense strand, or both the sense strand and the antisense strand comprises at least one modified nucleotide.

[0090] In one embodiment, the sense strand or the antisense strand is a sense strand or an antisense strand selected from the sense strand or antisense strand of a duplex selected from the group consisting of AD-1446213.1; AD-1446217.1; AD-1446222.1; AD-1446234.1; AD-1446243.1; AD-1446246.1; AD-1446252.1; AD-1446259.1; AD-1446265.1; AD-1446268.1; AD-1446271.1; AD-1446279.1; AD-1446289.1; and AD-1446294.1.

[0091] In one embodiment, the sense strand or the antisense strand is a sense strand or an antisense strand selected from the sense strand or antisense strand of a duplex selected from the group consisting of AD-1446213.1; AD-1446246.1; and AD-1446268.1.

[0092] In one aspect, the present invention provides a double stranded ribonucleic acid (dsRNA) agent for inhibiting expression of C9orf72, wherein the dsRNA agent comprises a sense strand and an antisense strand forming a double stranded region, wherein the antisense strand comprises at least 15. e.g., 15, 16, 17, 18, 19, 20, 21, 22, or 23, contiguous nucleotides differing by no more than 3, e.g., 3, 2, 1, or 0, nucleotides from any one of the antisense nucleotide sequences in any one of Tables 5, 6, 10B, and 10D; and wherein the sense strand, the antisense strand, or both the sense strand and the antisense strand comprises at least one modified nucleotide.

[0093] In another aspect, the present invention provides a double stranded ribonucleic acid (dsRNA) for inhibiting expression of c9orf72, wherein said dsRNA comprises a sense strand and an antisense strand forming a double stranded region, wherein the sense strand comprises at least 15, e.g., 15, 16, 17, 18, 19, 20, or 21, contiguous nucleotides differing by no more than three, e.g., 3, 2, 1, or 0, nucleotides from any one of the nucleotide sequence of nucleotides 1-23; 15-37; 33-55; 37-59; 59-81; 62-84; or 69-91 of SEQ ID NO: 1, and the antisense strand comprises at least 15, e.g., 15, 16, 17, 18, 19, 20, 21, 22, or 23, contiguous nucleotides from the corresponding nucleotide sequence of SEQ ID NO:5; and wherein the sense strand, the antisense strand, or both the sense strand and the antisense strand comprises at least one modified nucleotide.

[0094] In one embodiment, the antisense strand comprises at least 15, e.g., 15, 16, 17, 18, 19, 20, 21, 22, or 23, contiguous nucleotides differing by no more than three, e.g., 3, 2, 1, or 0, nucleotides from any one of the antisense strand nucleotide sequences of a duplex selected from the group consisting of AD-1446073.1; AD-1446075.1; AD-1285246.2; AD-1446084.1; AD-1446087.1; AD-1446090.1; and AD-1446095.1.

[0095] In one aspect, the present invention provides a double stranded ribonucleic acid (dsRNA) for inhibiting expression of c9orf72, wherein said dsRNA comprises a sense strand and an antisense strand forming a double stranded region, wherein the sense strand comprises at least 15, e.g., 15, 16, 17, 18, 19, 20, or 21, contiguous nucleotides differing by no more than three, e.g., 3, 2, 1, or 0, nucleotides from any one of the nucleotide sequence of nucleotides 5197-5219; 5213-5235; 5223-5245; 5226-5248; 5227-5249; 5228-5250, 5229-5251, 5230-5252, 5231-5253, 5233-5255; 5235-5256, 5241-5263; 5245-5267; 5233-5255; 5248-5270; 5539-5561; 5547-5569; 5917-5939; 5936-5958; 5954-5976; 6008-6030; 6021-6043; 6036-6058; 6043-6065; or 6048-6070 of SEQ ID NO: 15, and the antisense strand comprises at least 15, e.g., 15, 16, 17, 18, 19, 20, 21, 22, or 23, contiguous nucleotides from the corresponding nucleotide sequence of SEQ ID NO: 16; and wherein the sense strand, the antisense strand, or both the sense strand and the antisense strand comprises at least one modified nucleotide.

[0096] In one embodiment, the antisense strand comprises at least 15, e.g., 15, 16, 17, 18, 19, 20, 21, 22, or 23, contiguous nucleotides differing by no more than three, e.g., 3, 2, 1, or 0, nucleotides from any one of the antisense strand nucleotide sequences of a duplex selected from the group consisting of AD-1285231.1. AD-1285232.1. AD-1285233.1. AD-1285235.1. AD-1285237.1. AD-1285239.1. AD-1285240.1. AD-1285242.1, AD-1285244.1; AD-1285238.1; AD-1285243.1; AD-1285234.1; AD-1285241.1; AD-1285236.1; AD-1446111.1; AD-1446117.1; AD-1446147.1; AD-1446157.1; AD-1446168.1; AD-1446180.1; AD-1446189.1; AD-1446196.1; AD-1446202.1; AD-1446205.1.

[0097] In one embodiment, the antisense strand comprises at least 15, e.g., 15, 16, 17, 18, 19, 20, 21, 22, or 23, contiguous nucleotides differing by no more than three, e.g., 3, 2, 1, or 0, nucleotides from any one of the antisense strand nucleotide sequences of a duplex selected from the group consisting of AD-1285231.1. AD-1285232.1, AD-1285233.1. AD-1285234.1. AD-1285235.1, AD-1285236.1, AD-1285237.1. AD-1285239.1. AD-1285240.1, AD-1285241.1, AD-1285242.1, AD-1285243.1, AD-1446087.1, and AD-1446090.1.

[0098] In one embodiment, the antisense strand comprises at least 15, e.g., 15, 16, 17, 18, 19, 20, 21, 22, or 23, contiguous nucleotides differing by no more than three, e.g., 3, 2. 1, or 0, nucleotides from any one of the antisense strand nucleotide sequences of a duplex selected from the group consisting of AD-1285238.1 and AD-1285234.1.

[0099] In one aspect, the present invention provides a double stranded ribonucleic acid (dsRNA) for inhibiting expression of c9orf72, wherein the dsRNA comprises a sense strand and an antisense strand forming a double stranded region, wherein the sense strand comprises at least 15, e.g., 15, 16, 17, 18, 19, 20, or 21, contiguous nucleotides differing by no more than three, e.g., 3, 2, 1, or 0, nucleotides from any one of the nucleotide sequence of nucleotides 5015-5052; 5017-5040; 5032-5059; 5032-5055; 5033-5055; 5035-5059; 5036-5059; 5058-5087; 5059-5087; 5059-5084; 5064-5087; 5197-5222; 5213-5267; 5223-5252; 5229-5252; 5233-5263; 5516-5570; 5539-5565; 5539-5562; 5545-5570; 5545-5569; 5593-5616; 5883-5950; 5917-5950; 5919-5950; 5923-5950; 5934-5977; 5934-5957; 5938-5977; 5938-5965; 5938-5961; 5947-5977; 5947-5973; 5972-6001; 5973-5997; 6006-6029; 6011-6070; 6011-6039; 6011-6038; 6015-6038; 6019-6045; 6019-6042; 6033-6070; 6035-6065; 6035-6059; or 6040-6063 of SEQ ID NO: 15, and the antisense strand comprises at least 15, e.g., 15, 16, 17, 18, 19, 20, 21, 22, or 23, contiguous nucleotides from the corresponding nucleotide sequence of SEQ ID NO: 16; and wherein the sense strand, the antisense strand, or both the sense strand and the antisense strand comprises at least one modified nucleotide.

[0100] In one aspect, the present invention provides a double stranded ribonucleic acid (dsRNA) for inhibiting expression of c9orf72, wherein the dsRNA comprises a sense strand and an antisense strand forming a double stranded region, wherein the sense strand comprises at least 15, e.g., 15, 16, 17, 18, 19, 20, or 21, contiguous nucleotides differing by no more than three, e.g., 3, 2, 1, or 0, nucleotides from any one of the nucleotide sequence of nucleotides 15-52; 17-40; 32-59; 32-55; 35-59; 36-59; 58-87; 59-87; 59-84; or 64-87 of SEQ ID NO: 1, and the antisense strand comprises at least 15, e.g., 15, 16, 17, 18, 19, 20, 21, 22, or 23, contiguous nucleotides from the corresponding nucleotide sequence of SEQ ID NO:5; and wherein the sense strand, the antisense strand, or both the sense strand and the antisense strand comprises at least one modified nucleotide.

[0101] In one aspect, the present invention provides a double stranded ribonucleic acid (dsRNA) for inhibiting expression of c9orf72, wherein the dsRNA comprises a sense strand and an antisense strand forming a double stranded region, wherein the sense strand comprises at least 15, e.g., 15, 16, 17, 18, 19, 20, or 21, contiguous nucleotides differing by no more than three, e.g., 3, 2, 1, or 0, nucleotides from any one of the nucleotide sequence of nucleotides 27573296-27573584; 27573296-27573575; 27573301-27573338; 27573318-27573342; 27573555-27573583; 27573581-27573607; 27573584-27573607; 27573588-27573671; 27573588-27573666; 27573588-27573624; 27573592-27573624; 27573592-27573617; 27573598-27573624; 27573599-27573623; 27573606-27573655; 27573606-27573652; 27573606-27573647; 27573654-27573712; or 27573707-27573740 of SEQ ID NO: 13, and the antisense strand comprises at least 15, e.g., 15, 16, 17, 18, 19, 20, 21, 22, or 23, contiguous nucleotides from the corresponding nucleotide sequence of SEQ ID NO: 14; and wherein the sense strand, the antisense strand, or both the sense strand and the antisense strand comprises at least one modified nucleotide.

[0102] In one aspect, the present invention provides a double stranded ribonucleic acid (dsRNA) agent for inhibiting expression of C9orf72, wherein the dsRNA agent comprises a sense strand and an antisense strand forming a double stranded region, wherein the sense strand or the antisense strand is a sense strand or an antisense strand selected from the group consisting of any of the sense strands and antisense strands in any one of Table 8 and 9; and wherein the sense strand, the antisense strand, or both the sense strand and the antisense strand comprises at least one modified nucleotide.

[0103] In one embodiment, the sense strand, the antisense strand, or both the sense strand and the antisense strand is conjugated to one or more lipophilic moieties.

[0104] In one embodiment, the lipophilic moiety is conjugated to one or more internal positions in the double stranded region of the dsRNA agent.

[0105] In one embodiment, the lipophilic moiety is conjugated via a linker or carrier.

[0106] In one embodiment, the lipophilicity of the lipophilic moiety, measured by logKow, exceeds 0.

[0107] In one embodiment, the hydrophobicity of the double-stranded RNAi agent, measured by the unbound fraction in a plasma protein binding assay of the double-stranded RNAi agent, exceeds 0.2.

[0108] In one embodiment, the plasma protein binding assay is an electrophoretic mobility shift assay using human serum albumin protein.

[0109] In some embodiments, the dsRNA agent comprises at least one modified nucleotide.

[0110] In one embodiment, no more than five of the sense strand nucleotides and no more than five of the nucleotides of the antisense strand are unmodified nucleotides

[0111] In one embodiment, all of the nucleotides of the sense strand are modified nucleotides. In one embodiment, all of the nucleotides of the antisense strand are modified nucleotides. In one embodiment, all of the nucleotides of the sense strand and all of the nucleotides of the antisense strand are modified nucleotides.

[0112] In one embodiment, at least one of the modified nucleotide is selected from the group consisting of: a deoxy-nucleotide, a 3′-terminal deoxy-thymine (dT) nucleotide, a 2′-O-methyl modified nucleotide, a 2′-fluoro modified nucleotide, a 2′-deoxy-modified nucleotide, a 2′-O-hexadecyl modified nucleotide, a 2′-phosphate modified nucleotide, a 2′-5′-linked ribonucleotide (3′-RNA), a locked nucleotide, an unlocked nucleotide, a conformationally restricted nucleotide, a constrained ethyl nucleotide, an abasic nucleotide, an inverted abasic residue, a 2′-amino-modified nucleotide, a 2′-O-allyl-modified nucleotide, 2′-C-alkyl-modified nucleotide, 2′-hydroxly-modified nucleotide, a 2′-methoxyethyl modified nucleotide, a 2′-O-alkyl-modified nucleotide, a 2′,3′-seco-modified nucleotide, a morpholino nucleotide, a phosphoramidate, a non-natural base comprising nucleotide, a tetrahydropyran modified nucleotide, a 1.5-anhydrohexitol modified nucleotide, a cyclohexenyl modified nucleotide, a nucleotide comprising a 5′-phosphorothioate group, a nucleotide comprising a 5′-methylphosphonate group, a nucleotide comprising a 5′ phosphate or 5′ phosphate mimic, a nucleotide comprising vinyl phosphonate, a glycol modified nucleic acid (GNA), a nucleotide comprising glycol nucleic acid (GNA), a nucleotide comprising glycol nucleic acid S-Isomer (S-GNA), a nucleotide comprising 2-hydroxymethyl-tetrahydrofurane-5-phosphate, a nucleotide comprising 2′-deoxythymidine-3′-phosphate, a nucleotide comprising 2′-deoxyguanosine-3′-phosphate, and a terminal nucleotide linked to a cholesteryl derivative and a dodecanoic acid bisdecylamide group; and combinations thereof.

[0113] In one embodiment, the modified nucleotide is selected from the group consisting of a 2′-deoxy-2′-fluoro modified nucleotide, a 2′-deoxy-modified nucleotide, 3′-terminal deoxy-thymine nucleotides (dT), a 2′-O-hexadecyl modified nucleotide, a 2′-phosphate modified nucleotide, a glycol modified nucleotide, a locked nucleotide, an abasic nucleotide, a 2′-amino-modified nucleotide, a 2′-alkyl-modified nucleotide, a morpholino nucleotide, a phosphoramidate, and a non-natural base comprising nucleotide.

[0114] In one embodiment, the modified nucleotide comprises a short sequence of 3′-terminal deoxy-thymine nucleotides (dT).

[0115] In one embodiment, the modified nucleotides are independently selected from the group consisting of: 2′-O-methyl modified nucleotide, GNA modified nucleotides, and 2′fluoro modified nucleotides, 2′-phosphate modified nucleotide, 2′-O-hexadecyl modified nucleotide, and 2′-phosphate modified nucleotide.

[0116] In one embodiment, substantially all of the modified nucleotides of the sense strand are selected from the group consisting of 2′-O-methyl modified nucleotides and 2′-fluoro modified nucleotides. In some embodiments, all of the modified nucleotides of the sense strand are selected from the group consisting of 2′-O-methyl modified nucleotides and 2′-fluoro modified nucleotides.

[0117] In one embodiment, substantially all of the modified nucleotides of the antisense strand are selected from the group consisting of 2′-O-methyl modified nucleotides, 2′-phosphate modified nucleotides, glycol nucleic acid modified nucleotides and 2′-fluoro modified nucleotides. In some embodiments, all of the modified nucleotides of the antisense strand are selected from the group consisting of 2′-O-methyl modified nucleotides, 2′-phosphate modified nucleotides, glycol nucleic acid modified nucleotides and 2′-fluoro modified nucleotides.

[0118] In one embodiment, substantially all of the modified nucleotides of the sense strand are selected from the group consisting of 2′-O-methyl modified nucleotides, 2′-fluoro modified nucleotides, 2′-O-hexadecyl modified nucleotides, and a glycol nucleic acid (GNA) modified nucleotides. In some embodiments, all of the modified nucleotides of the sense strand are selected from the group consisting of 2′-O-methyl modified nucleotides, 2′-fluoro modified nucleotides, ′-O-hexadecyl modified nucleotides, and glycol nucleic acid (GNA) modified nucleotides.

[0119] In one embodiment, substantially all of the modified nucleotides of the antisense strand are selected from the group consisting of 2′-O-methyl modified nucleotides, 2′-fluoro modified nucleotides, 2′-phosphate modified nucleotides, and glycol nucleic acid (GNA) modified nucleotides. In some embodiments, all of the modified nucleotides of the antisense strand are selected from the group consisting of 2′-O-methyl modified nucleotides, 2′-fluoro modified nucleotides, 2′-phosphate modified nucleotides, and glycol nucleic acid (GNA) modified nucleotides.

[0120] In some embodiments, the dsRNA agent comprises at least one phosphorothioate internucleotide linkage.

[0121] In one embodiment, the dsRNA agent comprises 6-8 phosphorothioate internucleotide linkages.

[0122] In one embodiment, the sense strand comprises at least one phosphorothioate or methylphosphonate internucleotide linkage and the antisense strand comprises at least one phosphorothioate or methylphosphonate internucleotide linkage.

[0123] In one embodiment, the sense strand comprises at least two phosphorothioate or methylphosphonate internucleotide linkages.

[0124] In one embodiment, the antisense strand comprises at least two, at least three, or at least four phosphorothioate or methylphosphonate internucleotide linkages.

[0125] In one embodiment, the at least one phosphorothioate or methylphosphonate internucleotide linkage is at the 5′-terminus of one strand, at the 3′-terminus of one strand, or is at both the 5′-terminus and the 3′-terminus of one strand.

[0126] In one embodiment, the at least one phosphorothioate or methylphosphonate internucleotide linkage is at the 5′-terminus of the sense strand. In some embodiments, the sense strand comprises two phosphorothioate internucleotide linkages at the 5′-terminus. In some embodiments, the sense strand comprises one phosphorothioate internucleotide linkage at the 5′-terminus and one phosphorothioate internucleotide linkage at the 3′-terminus. In some embodiments, the sense strand comprises two phosphorothioate internucleotide linkages at the 5′-terminus and two phosphorothioate internucleotide linkages at the 3′-terminus.

[0127] In one embodiment, the at least one phosphorothioate or methylphosphonate internucleotide linkage is at both the 5′ terminus and the 3′ terminus of the antisense strand. In some embodiments, the antisense strand comprises two phosphorothioate internucleotide linkages at the 5′-terminus and two phosphorothioate internucleotide linkages at the 3′-terminus. In some embodiments, the antisense strand comprises two phosphorothioate internucleotide linkages at the 5′-terminus and 1 phosphorothioate internucleotide linkage at the 3′-terminus. In some embodiments, the antisense strand comprises three phosphorothioate internucleotide linkages at the 5′-terminus and one phosphorothioate internucleotide linkage at the 3′-terminus. In some embodiments, the antisense strand comprises three phosphorothioate internucleotide linkages at the 5′-terminus and two phosphorothioate internucleotide linkages at the 3′-terminus.

[0128] In one embodiment, all of the modified nucleotides of the sense strandare selected from the group consisting of 2′-O-methyl modified nucleotides, 2′-O-hexadecyl modified nucleotides, and 2′-fluoro modified nucleotides, all of the modified nucleotides of the antisense strand are selected from the group consisting of 2′-O-methyl modified nucleotides, 2′-phosphate modified nucleotides, glycol nucleic acid modified nucleotides, and 2′-fluoro modified nucleotides, the sense strand comprises two phosphorothioate internucleotide linkages at the 5′-terminus, and the antisense strand comprises two phosphorothioate internucleotide linkages at the 5′-terminus and two phosphorothioate internucleotide linkages or a vinyl-phosphonate at the 3′-terminus.

[0129] In one embodiment, the sense strand is no more than 30 nucleotides in length. In another embodiment, the antisense strand is no more than 30 nucleotides in length. In one embodiment, the sense strand and the antisense strand are each independently no more than 30 nucleotides in length.

[0130] In one embodiment, at least one strand comprises a 3′-overhang of at least 1 nucleotide. In another embodiment, at least one strand comprises a 3′-overhang of at least 2 nucleotides. In one embodiment, the antisense strand comprises the 3′-overhang.

[0131] The double stranded region may be 15-30 nucleotide pairs in length; 17-23 nucleotide pairs in length; 17-25 nucleotide pairs in length; 23-27 nucleotide pairs in length; 19-21 nucleotide pairs in length; 21-23 nucleotide pairs in length, or 17, 18, 19, 20, 21, 22, or 23 nucleotide pairs in length. In some embodiments, the double stranded region is 20 nucleotides in length. In some embodiments, the double stranded region is 21 nucleotides in length. The double stranded region may have 0, 1, 2, or 3 mismatches.

[0132] The sense strand and the antisense strand may each be independently 17-30 nucleotides, 17-25, 19-30 nucleotides; 19-25 nucleotides; 19-23 nucleotides; or 21-23 nucleotides in length, or 19, 20, 21, 22, or 23 nucleotides in length. In some embodiments, the sense strand is 20 nucleotides in length. In some embodiments, the antisense strand is 22 nucleotides in length. In some embodiments, the sense strand is 23 nucleotides in length. In some embodiments, the antisense strand is 21 nucleotides in length. In some embodiments, the sense strand is 23 nucleotides in length and the antisense strand is 21 nucleotides in length. In some embodiments the sense strand is 23 nucleotides in length and contains inverted abasic residues at the 3′ and 5′ terminal nucleotide positions.

[0133] In one embodiment, the region of complementarity is at least 17 nucleotides in length. In other embodiments, the region of complementarity is 19-30 nucleotides in length; 19-25 nucleotides in length; or 21-23 nucleotides in length.

[0134] In one embodiment, the region of complementarity is at least 85% complementary to a sequence between the start of exon 1A and the start of exon 2 of the C9orf72 gene. In some embodiments, the antisense strand comprises a sequence of 15-25 contiguous nucleotides having at least 85% complementarity to a sequence of 15-25 contiguous nucleotides present in the sequence between the start of exon 1A and the start of exon 2 of the C9orf72 target RNA. In other embodiments, the region of complementarity is at least 90% complementary to a sequence between the start of exon 1A and the start of exon 2 of the C9orf72 target RNA. In one embodiment, the region of complementarity is at least 95% complementary to a sequence between the start of exon 1A and the start of exon 2 of the C9orf72 target RNA. In some embodiments, the region of complementarity is 100% complementary to a sequence between the start of exon 1A and the start of exon 2 of the C9orf72 target RNA. In some embodiments, the region of complementarity is 100% complementary to a sequence between the end of exon 1A and the start of the hexanucleotide repeat region of the C9orf72 target RNA.

[0135] In one embodiment, the region of complementarity is at least 85% complementary to a sequence between the end of exon 1A and the start of hexanucleotide repeat in intron 1A of the C9orf72 gene. In some embodiments, the antisense strand comprises a sequence of 15-25 contiguous nucleotides having at least 85% complementarity to a sequence of 15-25 contiguous nucleotides present in the sequence between the end of exon 1A and the start of hexanucleotide repeat in intron 1A of the C9orf72 target RNA. In other embodiments, the region of complementarity is at least 90% complementary to a sequence between the end of exon 1A and the start of hexanucleotide repeat in intron 1A of the C9orf72 target RNA. In one embodiment, the region of complementarity is at least 95% complementary to a sequence between the end of exon 1A and the start of hexanucleotide repeat in intron 1A of the C9orf72 target RNA. In some embodiments, the region of complementarity is 100% complementary to a sequence between the end of exon 1A and the start of hexanucleotide repeat in intron 1A of the C9orf72 target RNA.

[0136] In some embodiments of the compositions and methods of the invention, an RNAi agent further comprises one or more lipophilic moieties. The lipophilic moiety conjugated RNAi agents are advantageous for the in vivo delivery of nucleic acids, as well as compositions suitable for in vivo therapeutic use, as described herein. In one embodiment, one or more lipophilic moieties are conjugated to one or more internal positions on at least one strand. The lipophilic moiety can be conjugated to the internal positions via a linker or carrier. In some embodiments, the lipophilic moiety facilitates or improves delivery of the RNAi agent to a neuronal cell or a cell in a neuronal tissue.

[0137] In one embodiment, the internal position can be any position except the terminal two positions from each end of the at least one strand.

[0138] In another embodiment, the internal position can be any position except the terminal three positions from each end of the at least one strand.

[0139] In one embodiment, the internal position excludes a cleavage site region of the sense strand.

[0140] In one embodiment, the internal position can be any position except positions 9-12, counting from the 5′-end of the sense strand.

[0141] In another embodiment, the internal position can be any position except positions 11-13, counting from the 3′-end of the sense strand.

[0142] In one embodiment, the internal position excludes a cleavage site region of the antisense strand.

[0143] In one embodiment, the internal position can be any position except positions 12-14, counting from the 5′-end of the antisense strand.

[0144] In one embodiment, the internal position can be any position except positions 11-13 on the sense strand, counting from the 3′-end, and positions 12-14 on the antisense strand, counting from the 5′-end.

[0145] In one embodiment, the one or more lipophilic moieties are conjugated to one or more of the internal positions selected from the group consisting of positions 4-8 and 13-18 on the sense strand, and positions 6-10 and 15-18 on the antisense strand, counting from the 5′ end of each strand.

[0146] In another embodiment, the one or more lipophilic moieties are conjugated to one or more of the internal positions selected from the group consisting of positions 5, 6, 7, 15, and 17 on the sense strand, and positions 15 and 17 on the antisense strand, counting from the 5′-end of each strand.

[0147] In one embodiment, the internal positions in the double stranded region exclude a cleavage site region of the sense strand.

[0148] In one embodiment, the sense strand is 21 nucleotides in length, the antisense strand is 23 nucleotides in length, and the lipophilic moiety is conjugated to position 21, position 20, position 15, position 1, position 7, position 6, or position 2 of the sense strand or position 16 of the antisense strand, counting from the 5′-end.

[0149] In one embodiment, the lipophilic moiety is conjugated to position 21, position 20, position 15, position 1, or position 7 of the sense strand.

[0150] In another embodiment, the lipophilic moiety is conjugated to position 21, position 20, or position 15 of the sense strand, counting from the 5′-end.

[0151] In yet another embodiment, the lipophilic moiety is conjugated to position 20 or position 15 of the sense strand, counting from the 5′-end.

[0152] In one embodiment, the lipophilic moiety is conjugated to position 16 of the antisense strand, counting from the 5′-end.

[0153] In one embodiment, the lipophilic moiety is an aliphatic, alicyclic, or polyalicyclic compound. In one embodiment, the lipophilic moiety is selected from the group consisting of lipid, cholesterol, retinoic acid, cholic acid, adamantane acetic acid, 1-pyrene butyric acid, dihydrotestosterone, 1,3-bis-O(hexadecyl)glycerol, geranyloxyhexyanol, hexadecylglycerol, borneol, menthol, 1.3-propanediol, heptadecyl group, palmitic acid, myristic acid, 03-(oleoyl)lithocholic acid, O3-(oleoyl)cholenic acid, dimethoxytrityl, or phenoxazine.

[0154] In one embodiment, the lipophilic moiety contains a saturated or unsaturated C4-C30 hydrocarbon chain, and an optional functional group selected from the group consisting of hydroxyl, amine, carboxylic acid, sulfonate, phosphate, thiol, azide, alkenyl, and alkynyl. In one embodiment, the the lipophilic moiety contains a C6-C30 alkyl, a C6-C30 alkenyl, or a C6-C30 alkynyl.

[0155] In one embodiment, the lipophilic moiety contains a saturated or unsaturated C6-C18 hydrocarbon chain. In one embodiment, the lipophilic moiety contains a saturated or unsaturated C6, C7. C8, C9, C10, C11, C12, C13, C15, C15, C16, C17, or C18 hydrocarbon chain. An unsaturated C6-C18 can be a monounsaturated C6-C18 or a polyunsaturated C6-C18.

[0156] In one embodiment, the lipophilic moiety contains a saturated or unsaturated C16 hydrocarbon chain. In one embodiment, the lipophilic moiety contains a C16 alkyl, a C16 alkenyl, or a C16 alkynyl. An unsaturated C16 can be a monounsaturated C16 or a polyunsaturated C16.

[0157] In one embodiment, the saturated or unsaturated C16 hydrocarbon chain is conjugated to position 6, counting from the 5′-end of the strand.

[0158] In one embodiment, the lipophilic moiety is conjugated via a carrier that replaces one or more nucleotide(s) in the internal position(s) or the double stranded region.

[0159] In one embodiment, the carrier is a cyclic group selected from the group consisting of pyrrolidinyl, pyrazolinyl, pyrazolidinyl, imidazolinyl, imidazolidinyl, piperidinyl, piperazinyl, [1.3]dioxolanyl, oxazolidinyl, isoxazolidinyl, morpholinyl, thiazolidinyl, isothiazolidinyl, quinoxalinyl, pyridazinonyl, tetrahydrofuranyl, and decalinyl; or is an acyclic moiety based on a serinol backbone or a diethanolamine backbone.

[0160] In one embodiment, the lipophilic moiety is conjugated to the double-stranded iRNA agent via a linker containing an ether, thioether, urea, carbonate, amine, amide, maleimide-thioether, disulfide, phosphodiester, sulfonamide linkage, a product of a click reaction, or carbamate.

[0161] In one embodiment, the lipophilic moiety is conjugated to a nucleobase, sugar moiety, or internucleosidic linkage.

[0162] In one embodiment, the lipophilic moiety or targeting ligand is conjugated via a bio-cleavable linker selected from the group consisting of DNA, RNA, disulfide, amide, functionalized monosaccharides or oligosaccharides of galactosamine, glucosamine, glucose, galactose, mannose, and combinations thereof.

[0163] In one embodiment, the 3′ end of the sense strand is protected via an end cap which is a cyclic group having an amine, said cyclic group being selected from the group consisting of pyrrolidinyl, pyrazolinyl, pyrazolidinyl, imidazolinyl, imidazolidinyl, piperidinyl, piperazinyl, [1,3]dioxolanyl, oxazolidinyl, isoxazolidinyl, morpholinyl, thiazolidinyl, isothiazolidinyl, quinoxalinyl, pyridazinonyl, tetrahydrofuranyl, and decalinyl.

[0164] In one embodiment, the dsRNA agent further comprises a tareting ligand that targets a neuronal cell, a cell in a neuronal tissue, or a cell in a central nervous system tissue.

[0165] In one embodiment, the dsRNA agent further comprises a targeting ligand that targets a liver tissue.

[0166] In one embodiment, the targeting ligand is a GalNAc conjugate.

[0167] In one embodiment, the dsRNA agent further comprises a terminal, chiral modification occurring at the first internucleotide linkage at the 3′ end of the antisense strand, having the linkage phosphorus atom in Sp configuration, a terminal, chiral modification occurring at the first internucleotide linkage at the 5′ end of the antisense strand, having the linkage phosphorus atom in Rp configuration, and a terminal, chiral modification occurring at the first internucleotide linkage at the 5′ end of the sense strand, having the linkage phosphorus atom in either Rp configuration or Sp configuration.

[0168] In another embodiment, the dsRNA agent further comprises a terminal, chiral modification occurring at the first and second internucleotide linkages at the 3′ end of the antisense strand, having the linkage phosphorus atom in Sp configuration, a terminal, chiral modification occurring at the first internucleotide linkage at the 5′ end of the antisense strand, having the linkage phosphorus atom in Rp configuration, and a terminal, chiral modification occurring at the first internucleotide linkage at the 5′ end of the sense strand, having the linkage phosphorus atom in either Rp or Sp configuration.

[0169] In yet another embodiment, the dsRNA agent further comprises a terminal, chiral modification occurring at the first, second and third internucleotide linkages at the 3′ end of the antisense strand, having the linkage phosphorus atom in Sp configuration, a terminal, chiral modification occurring at the first internucleotide linkage at the 5′ end of the antisense strand, having the linkage phosphorus atom in Rp configuration, and a terminal, chiral modification occurring at the first internucleotide linkage at the 5′ end of the sense strand, having the linkage phosphorus atom in either Rp or Sp configuration.

[0170] In another embodiment, the dsRNA agent further comprises a terminal, chiral modification occurring at the first, and second internucleotide linkages at the 3′ end of the antisense strand, having the linkage phosphorus atom in Sp configuration, a terminal, chiral modification occurring at the third internucleotide linkages at the 3′ end of the antisense strand, having the linkage phosphorus atom in Rp configuration, a terminal, chiral modification occurring at the first internucleotide linkage at the 5′ end of the antisense strand, having the linkage phosphorus atom in Rp configuration, and a terminal, chiral modification occurring at the first internucleotide linkage at the 5′ end of the sense strand, having the linkage phosphorus atom in either Rp or Sp configuration.

[0171] In another embodiment, the dsRNA agent further comprises a terminal, chiral modification occurring at the first, and second internucleotide linkages at the 3′ end of the antisense strand, having the linkage phosphorus atom in Sp configuration, a terminal, chiral modification occurring at the first, and second internucleotide linkages at the 5′ end of the antisense strand, having the linkage phosphorus atom in Rp configuration, and a terminal, chiral modification occurring at the first internucleotide linkage at the 5′ end of the sense strand, having the linkage phosphorus atom in either Rp or Sp configuration.

[0172] In one embodiment, the dsRNA agent further comprises a phosphate or phosphate mimic at the 5′-end of the antisense strand.

[0173] In one embodiment, the phosphate mimic is a 5′-vinyl phosphonate (VP).

[0174] In one embodiment, the base pair at the 1 position of the 5′-end of the antisense strand of the duplex is an AU base pair.

[0175] In one embodiment, the sense strand has a total of 21 nucleotides and the antisense strand has a total of 23 nucleotides.

[0176] In one embodiment, the dsRNA agent inhibits expression of the C9orf72 target RNA comprising the hexanucleotide repeat by at least 10%, at least 20%, at least 30%, at least 40%, at least 50%, or at least 60% within 24-48 hours after administration to a cell expressing the C9orf72 target RNA comprising the hexanucleotide repeat.

[0177] In one embodiment, the dsRNA agent selectively inhibits expression of the C9orf72 target RNA comprising the hexanucleotide repeat relative to expression of a mature C9orf72 messenger RNA.

[0178] In one embodiment, the dsRNA agent inhibits expression of the mature C9orf72 messenger RNA by less than 50%, less than 40%, less than 30%, less than 20%, or less than 10% within 24-48 hours after administration to a cell expressing the mature C9orf72 messenger RNA.

[0179] In one embodiment, the dsRNA agent reduces (poly(GA), poly(GR), poly(GP), poly(PA), and poly(PR) dipeptide repeat protein synthesis within 24-48 hours after administration to a cell expressing the C9orf72 target RNA comprising the hexanucleotide repeat. In some embodiments, the dsRNA agent reduces dipeptide repeat protein synthesis by at least 10%, at least 20%, at least 30%, at least 40%, at least 50%, at least 60%, at least 70%, or at least 80% within 24-48 hours after administration to the cell.

[0180] The present invention also provides cells and pharmaceutical compositions for inhibiting expression of a gene encoding C9orf72 comprising the dsRNA agents of the invention, such.

[0181] In one embodiment, the dsRNA agent is in an unbuffered solution, such as saline or water.

[0182] In another embodiment, the dsRNA agent is in a buffer solution, such as a buffer solution comprising acetate, citrate, prolamine, carbonate, or phosphate or any combination thereof; or phosphate buffered saline (PBS).

[0183] The present invention further provides a composition comprising two or more, e.g., 2, 3, or 4, dsRNA agents for inhibiting expression of C9orf72.

[0184] In one embodiment, the composition comprises a first dsRNA agent targeting a sense strand of C9orf72 (an exon or intron of C9orf72) and a seond dsRNA agent targeting an antisense strand of C9orf72 (an exon or intron of C9orf72).

[0185] In some embodiments, suitable agents targeting a sense strand of C9orf72 for use in the compositions of the invention comprising two or more dsRNA agents comprise a sense strand and an antisense strand, forming a double stranded region, and selected from the group consisting of
[0186] a) a sense strand comprising at least 15 contiguous nucleotides differing by no more than 3 nucleotides from the nucleotide sequence of SEQ ID NO:1 and an antisense strand comprising a nucleotide sequence comprising at least 15 contiguous nucleotides differing by no more than 3 nucleotides from the corresponding portion of the nucleotide sequence of SEQ ID NO:5,
[0187] b) a sense strand comprising at least 15 contiguous nucleotides differing by no more than 3 nucleotides from the nucleotide sequence of SEQ ID NO:15 and an antisense strand comprising a nucleotide sequence comprising at least 15 contiguous nucleotides differing by no more than 3 nucleotides from the corresponding portion of the nucleotide sequence of SEQ ID NO:16,
[0188] c) an antisense strand comprising at least 15 contiguous nucleotides differing by no more than 3 nucleotides from any one of the antisense nucleotide sequences in any one of Tables 5, 6, 10B, and 10D; and wherein the sense strand, the antisense strand, or both the sense strand and the antisense strand is conjugated to one or more lipophilic moieties;
[0189] d) a sense strand comprising at least 15 contiguous nucleotides differing by no more than three nucleotides from any one of the nucleotide sequence of nucleotides 1-23; 15-37; 33-55; 37-59; 59-81; 62-84, or 69-91 of SEQ ID NO: 1, and an antisense strand comprising at least 15 contiguous nucleotides from the corresponding nucleotide sequence of SEQ ID NO:5;
[0190] e) a sense strand comprising at least 15 contiguous nucleotides differing by no more than three nucleotides from any one of the nucleotide sequence of nucleotides 5197-5219; 5213-5235; 5223-5245, 5226-5248; 5227-5249, 5228-5250, 5229-5251, 5230-5252, 5231-5253, 5233-5255; 5235-5256, 5241-5263; 5245-5267; 5233-5255; 5248-5270; 5539-5561; 5547-5569; 5917-5939; 5936-5958; 5954-5976; 6008-6030; 6021-6043; 6036-6058; 6043-6065; or 6048-6070 of SEQ ID NO: 15, and an antisense strand comprising at least 15 contiguous nucleotides from the corresponding nucleotide sequence of SEQ ID NO:16;
[0191] f) a sense strand comprising at least 15 contiguous nucleotides differing by no more than three nucleotides from any one of the nucleotide sequence of nucleotides 5015-5052; 5017-5040; 5032-5059; 5032-5055; 5033-5055; 5035-5059; 5036-5059; 5058-5087; 5059-5087; 5059-5084; 5064-5087; 5197-5222; 5213-5267; 5223-5252; 5229-5252; 5233-5263; 5516-5570; 5539-5565; 5539-5562; 5545-5570; 5545-5569; 5593-5616; 5883-5950; 5917-5950; 5919-5950; 5923-5950; 5934-5977; 5934-5957; 5938-5977; 5938-5965; 5938-5961; 5947-5977; 5947-5973; 5972-6001; 5973-5997; 6006-6029; 6011-6070; 6011-6039; 6011-6038; 6015-6038; 6019-6045; 6019-6042; 6033-6070; 6035-6065; 6035-6059; or 6040-6063 of SEQ ID NO: 15, and an antisense strand comprising at least 15 contiguous nucleotides from the corresponding nucleotide sequence of SEQ ID NO:16;
[0192] g) a sense strand comprising at least 15 contiguous nucleotides differing by no more than three nucleotides from any one of the nucleotide sequence of nucleotides 15-52; 17-40; 32-59; 32-55; 35-59; 36-59; 58-87; 59-87; 59-84; or 64-87 of SEQ ID NO: 1, and an antisense strand comprising at least 15 contiguous nucleotides from the corresponding nucleotide sequence of SEQ ID NO:5; and
[0193] h) an antisense strand comprising at least 15 contiguous nucleotides differing by no more than 3 nucleotides from any one of the antisense nucleotide sequences in any one of Tables 8 and 9, wherein the sense strand, the antisense strand, or both the sense strand and the antisense strand comprises at least one modified nucleotide.

[0194] In certain embodiments, suitable agents targeting a sense strand of C9orf72, e.g., of a C9orf72 exon or intron sense sequence, for use in the compositions of the invention comprising two or more dsRNA agents such as those dsRNA agents disclosed in PCT Publication No. WO 2021/119226, the entire contents of which are incorporated herein by reference.

[0195] In certain embodiments, suitable agents targeting an antisense strand of C9orf72 for use in the compositions of the invention comprising two or more dsRNA agents comprise a sense strand and an antisense strand, forming a double stranded region, and selected from the group consisting of
[0196] a) a sense strand comprising at least 15 contiguous nucleotides differing by no more than 3 nucleotides from the nucleotide sequence of SEQ ID NO: 13 and an antisense strand comprising a nucleotide sequence comprising at least 15 contiguous nucleotides differing by no more than 3 nucleotides from the corresponding portion of the nucleotide sequence of SEQ ID NO:14,
[0197] b) a sense strand comprising at least 15 contiguous nucleotides differing by no more b) than 3 nucleotides from the nucleotide sequence of SEQ ID NO: 17 and an antisense strand comprising a nucleotide sequence comprising at least 15 contiguous nucleotides differing by no more than 3 nucleotides from the corresponding portion of the nucleotide sequence of SEQ ID NO:18,
[0198] c) a sense strand comprising at least 15 contiguous nucleotides differing by no more than 3 nucleotides from the nucleotide sequence of SEQ ID NO: 19 and an antisense strand comprising a nucleotide sequence comprising at least 15 contiguous nucleotides differing by no more than 3 nucleotides from the corresponding portion of the nucleotide sequence of SEQ ID NO:20,
[0199] d) an antisense comprising a nucleotide sequence selected from the group consisting of any of the antisense strand nucleotide sequences in any one of Tables 2, 3, 10A, 10C, 11, and 12; and
[0200] e) a sense strand comprising at least 15 contiguous nucleotides differing by no more than three nucleotides from nucleotides 27573296-27573318; 27573314-27573336; 27573319-27573341; 27573562-27573584; 27573585-27573607; 27573592-27573614; 27573599-27573621; 27573608-27573630; 27573616-27573638; 27573619-27573641; 27573622-27573644; 27573633-27573655; 27573690-27573712; or 27573717-27573739 of SEQ ID NO: 13;
[0201] f) a sense strand comprising at least 15 contiguous nucleotides differing by no more than three nucleotides from any one of the nucleotide sequence of nucleotides 27573296-27573584; 27573296-27573575; 27573301-27573338; 27573318-27573342; 27573555-27573583; 27573581-27573607; 27573584-27573607; 27573588-27573671; 27573588-27573666; 27573588-27573624; 27573592-27573624; 27573592-27573617; 27573598-27573624; 27573599-27573623; 27573606-27573655; 27573606-27573652; 27573606-27573647; 27573654-27573712; or 27573707-27573740 of SEQ ID NO: 13, and an antisense strand comprising at least 15 contiguous nucleotides from the corresponding nucleotide sequence of SEQ ID NO: 14,
[0202] wherein the sense strand, the antisense strand, or both the sense strand and the antisense strand comprises at least one modified nucleotide.

[0203] In one aspect, the present invention provides a composition comprising two or more double stranded ribonucleic acid (dsRNA) agents for inhibiting expression of C9orf72.
[0204] wherein each dsRNA agent independently comprises a sense strand and an antisense strand forming a double stranded region,
[0205] wherein a first dsRNA agent targeting the antisense strand of C9orf72 is selected from the group consisting of
[0206] a) a dsRNA agent comprising a sense strand comprising at least 15 contiguous nucleotides differing by no more than 3 nucleotides from the nucleotide sequence of SEQ ID NO: 13 and an antisense strand comprising a nucleotide sequence comprising at least 15 contiguous nucleotides differing by no more than 3 nucleotides from the corresponding portion of the nucleotide sequence of SEQ ID NO: 14,
[0207] b) a sense strand comprising at least 15 contiguous nucleotides differing by no more than 3 nucleotides from the nucleotide sequence of SEQ ID NO: 17 and an antisense strand comprising a nucleotide sequence comprising at least 15 contiguous nucleotides differing by no more than 3 nucleotides from the corresponding portion of the nucleotide sequence of SEQ ID NO: 18,
[0208] c) a sense strand comprising at least 15 contiguous nucleotides differing by no more than 3 nucleotides from the nucleotide sequence of SEQ ID NO: 19 and an antisense strand comprising a nucleotide sequence comprising at least 15 contiguous nucleotides differing by no more than 3 nucleotides from the corresponding portion of the nucleotide sequence of SEQ ID NO:20,
[0209] d) a dsRNA agent comprising an antisense strand comprising a nucleotide sequence selected from the group consisting of any of the antisense strand nucleotide sequences in any one of Tables 2, 3, 10A, 10C, 11, and 12;
[0210] e) a dsRNA agent comprising a sense strand comprising at least 15 contiguous nucleotides differing by no more than three nucleotides from nucleotides 27573296-27573318; 27573314-27573336; 27573319-27573341; 27573562-27573584; 27573585-27573607; 27573592-27573614; 27573599-27573621; 27573608-27573630; 27573616-27573638; 27573619-27573641; 27573622-27573644; 27573633-27573655; 27573690-27573712; or 27573717-27573739 of SEQ ID NO: 13; and
[0211] f) a dsRNA agent comprising a sense strand comprising at least 15 contiguous nucleotides differing by no more than three nucleotides from any one of the nucleotide sequence of nucleotides 27573296-27573584; 27573296-27573575; 27573301-27573338; 27573318-27573342; 27573555-27573583; 27573581-27573607; 27573584-27573607; 27573588-27573671; 27573588-27573666; 27573588-27573624; 27573592-27573624; 27573592-27573617; 27573598-27573624; 27573599-27573623; 27573606-27573655; 27573606-27573652; 27573606-27573647; 27573654-27573712; or 27573707-27573740 of SEQ ID NO: 13, and an antisense strand comprising at least 15 contiguous nucleotides from the corresponding nucleotide sequence of SEQ ID NO:14; and
[0212] wherein a second dsRNA agent targeting the sense strand of C9orf72 is selected from the group consisting of
[0213] a) a sense strand comprising at least 15 contiguous nucleotides differing by no more than 3 nucleotides from the nucleotide sequence of SEQ ID NO: 1 and an antisense strand comprising a nucleotide sequence comprising at least 15 contiguous nucleotides differing by no more than 3 nucleotides from the corresponding portion of the nucleotide sequence of SEQ ID NO:5,
[0214] b) a sense strand comprising at least 15 contiguous nucleotides differing by no more than 3 nucleotides from the nucleotide sequence of SEQ ID NO: 15 and an antisense strand comprising a nucleotide sequence comprising at least 15 contiguous nucleotides differing by no more than 3 nucleotides from the corresponding portion of the nucleotide sequence of SEQ ID NO:16,
[0215] c) a dsRNA agent comprising an antisense strand comprising at least 15 contiguous nucleotides differing by no more than 3 nucleotides from any one of the antisense nucleotide sequences in any one of Tables 5, 6, 10B, and 10D;
[0216] d) a dsRNA agent comprising a sense strand comprising at least 15 contiguous nucleotides differing by no more than three nucleotides from any one of the nucleotide sequence of nucleotides 1-23; 15-37; 33-55; 37-59; 59-81, 62-84, 69-91 of SEQ ID NO: 1, and an antisense strand comprising at least 15 contiguous nucleotides from the corresponding nucleotide sequence of SEQ ID NO:5;
[0217] e) a dsRNA agent comprising a sense strand comprising at least 15 contiguous nucleotides differing by no more than three nucleotides from any one of the nucleotide sequence of nucleotides 5197-5219; 5213-5235; 5223-5245, 5226-5248; 5227-5249, 5228-5250, 5229-5251, 5230-5252, 5231-5253, 5233-5255; 5235-5256, 5241-5263; 5245-5267; 5233-5255; 5248-5270; 5539-5561; 5547-5569; 5917-5939; 5936-5958; 5954-5976; 6008-6030; 6021-6043; 6036-6058; 6043-6065; or 6048-6070 of SEQ ID NO: 15, and an antisense strand comprising at least 15 contiguous nucleotides from the corresponding nucleotide sequence of SEQ ID NO:16;
[0218] f) a dsRNA agent comprising a sense strand comprising at least 15 contiguous nucleotides differing by no more than three nucleotides from any one of the nucleotide sequence of nucleotides 5015-5052; 5017-5040; 5032-5059; 5032-5055; 5033-5055; 5035-5059; 5036-5059; 5058-5087; 5059-5087; 5059-5084; 5064-5087; 5197-5222; 5213-5267; 5223-5252; 5229-5252; 5233-5263; 5516-5570; 5539-5565; 5539-5562; 5545-5570; 5545-5569; 5593-5616; 5883-5950; 5917-5950; 5919-5950; 5923-5950; 5934-5977; 5934-5957; 5938-5977; 5938-5965; 5938-5961; 5947-5977; 5947-5973; 5972-6001; 5973-5997; 6006-6029; 6011-6070; 6011-6039; 6011-6038; 6015-6038; 6019-6045; 6019-6042; 6033-6070; 6035-6065; 6035-6059; or 6040-6063 of SEQ ID NO: 15, and an antisense strand comprising at least 15 contiguous nucleotides from the corresponding nucleotide sequence of SEQ ID NO:16;
[0219] g) a dsRNA agent comprising a sense strand comprising at least 15 contiguous nucleotides differing by no more than three nucleotides from any one of the nucleotide sequence of nucleotides 15-52; 17-40; 32-59; 32-55; 35-59; 36-59; 58-87; 59-87; 59-84; or 64-87 of SEQ ID NO: 1, and an antisense strand compriing at least 15 contiguous nucleotides from the corresponding nucleotide sequence of SEQ ID NO:5; and
[0220] h) a dsRNA agent comprising an antisense strand comprising at least 15 contiguous nucleotides differing by no more than 3 nucleotides from any one of the antisense nucleotide sequences in any one of Tables 8 and 9; and
[0221] wherein the sense strand of the first dsRNA, the antisense strand of the first dsRNA, both the sense strand and the antisense strand of the first dsRNA, the sense strand of the second dsRNA, the antisense strand of the second dsRNA, and/or both the sense strand and the antisense strand of the second dsRNA comprises at least one modified nucleotide.

[0222] In one embodiment, the sense strand or the antisense strand is a sense strand or an antisense strand selected from the sense strand or antisense strand of a duplex selected from the group consisting of AD-1446213.1; AD-1446217.1; AD-1446222.1; AD-1446234.1; AD-1446243.1; AD-1446246.1; AD-1446252.1; AD-1446259.1; AD-1446265.1; AD-1446268.1; AD-1446271.1; AD-1446279.1; AD-1446289.1; and AD-1446294.1.

[0223] In one embodiment, the sense strand or the antisense strand is a sense strand or an antisense strand selected from the sense strand or antisense strand of a duplex selected from the group consisting of AD-1446213.1; AD-1446246.1; and AD-1446268.1.

[0224] In one embodiment, the antisense strand comprises at least 15 contiguous nucleotides differing by no more than three, two or one nucleotides from any one of the antisense strand nucleotide sequences and/or the sense strand nucleotide sequences of a duplex selected from the group consisting of AD-1446073.1; AD-1446075.1; AD-1285246.2; AD-1446084.1; AD-1446087.1; AD-1446090.1, and AD1446095.1.

[0225] In one embodiment, the antisense strand comprises at least 15 contiguous nucleotides differing by no more than three, two or one nucleotides from any one of the antisense strand nucleotide sequences and/or the sense strand nucleotide sequences of a duplex selected from the group consisting of AD-1285231.1, AD-1285232.1. AD-1285233.1. AD-1285235.1. AD-1285237.1. AD-1285239.1. AD-1285240.1. AD-1285242.1. AD-1285244.1; AD-1285238.1; AD-1285234.1; AD-1285243.1; AD-1285241.1; AD-1285236.1; AD-1446111.1; AD-1446117.1; AD-1446147.1; AD-1446157.1; AD-1446168.1; AD-1446180.1; AD-1446189.1; AD-1446196.1; AD-1446202.1; AD-1446205.1.

[0226] In one embodiment, the antisense strand comprises at least 15 contiguous nucleotides differing by no more than three, two or one nucleotides from any one of the antisense strand nucleotide sequences and/or the sense strand nucleotide sequences of a duplex selected from the group consisting of AD-1285238.1 and AD-1285234.1.

[0227] In one embodiment, the antisense strand of the first dsRNA agent comprises at least 15 contiguous nucleotides differing by no more than three, two or one nucleotides from any one of the antisense strand nucleotide sequences and or the sense strand nucleotide sequences of a duplex selected from the group consisting of AD-1446213.1. AD-1446246.1, and AD-1446268.1; and the antisense strand of the second dsRNA agent comprises at least 15 contiguous nucleotides differing by no more than three, two or one nucleotides from any one of the antisense strand nucleotide sequences and/or the sense strand nucleotide sequences of a duplex selected from the group consisting of AD-1285238.1 and AD-1285234.1.

[0228] In one embodiment, a) the first dsRNA agent comprises an antisense strand comprising a nucleotide sequence comprising at least 15 contiguous nucleotides differing by no more than 3 nucleotides from the antisense sequence of AD-1446213; and the second dsRNA agent comprises an antisense strand comprising a nucleotide sequence comprising at least 15 contiguous nucleotides differing by no more than 3 nucleotides from the antisense sequence of AD-1285238;
[0229] b) the first dsRNA agent comprises an antisense strand comprising a nucleotide sequence comprising at least 15 contiguous nucleotides differing by no more than 3 nucleotides from the antisense sequence of AD-1446213; and the second dsRNA agent comprises an antisense strand comprising a nucleotide sequence comprising at least 15 contiguous nucleotides differing by no more than 3 nucleotides from the antisense sequence of AD-1285234;
[0230] c) the first dsRNA agent comprises an antisense strand comprising a nucleotide sequence comprising at least 15 contiguous nucleotides differing by no more than 3 nucleotides from the antisense sequence of AD-1446246; and the second dsRNA agent comprises an antisense strand comprising a nucleotide sequence comprising at least 15 contiguous nucleotides differing by no more than 3 nucleotides from the antisense sequence of AD-1285238;
[0231] d) the first dsRNA agent comprises an antisense strand comprising a nucleotide sequence comprising at least 15 contiguous nucleotides differing by no more than 3 nucleotides from the antisense sequence of AD-1446246; and the second dsRNA agent comprises an antisense strand comprising a nucleotide sequence comprising at least 15 contiguous nucleotides differing by no more than 3 nucleotides from the antisense sequence of AD-1285234;
[0232] e) the first dsRNA agent comprises an antisense strand comprising a nucleotide sequence comprising at least 15 contiguous nucleotides differing by no more than 3 nucleotides from the antisense sequence of AD-1446268; and the second dsRNA agent comprises an antisense strand comprising a nucleotide sequence comprising at least 15 contiguous nucleotides differing by no more than 3 nucleotides from the antisense sequence of AD-1285238;
[0233] f) the first dsRNA agent comprises an antisense strand comprising a nucleotide sequence comprising at least 15 contiguous nucleotides differing by no more than 3 nucleotides from the antisense sequence of AD-1446268; and the second dsRNA agent comprises an antisense strand comprising a nucleotide sequence comprising at least 15 contiguous nucleotides differing by no more than 3 nucleotides from the antisense sequence of AD-1285234.

[0234] In another embodiment, a) the first dsRNA agent comprises the antisense strand and/or the sense strand of AD-1446213 and the second dsRNA agent comprises the antisense strand and/or the sense strand of AD-1285238;
[0235] b) the first dsRNA agent comprises the antisense strand and/or the sense strand of AD-1446213 and the second dsRNA agent comprises the antisense strand and/or the sense strand of AD-1285234;
[0236] c) the first dsRNA agent comprises the antisense strand and/or the sense strand of AD-1446246 and the second dsRNA agent comprises the antisense strand and/or the sense strand of AD-1285238;
[0237] d) the first dsRNA agent comprises the antisense strand and/or the sense strand of AD-1446246 and the second dsRNA agent comprises the antisense strand and/or the sense strand of AD-1285234;
[0238] e) the first dsRNA agent comprises the antisense strand and/or the sense strand of AD-1446268 and the second dsRNA agent comprises the antisense strand and/or the sense strand of AD-1285238; or
[0239] f) the first dsRNA agent comprises the antisense strand and/or the sense strand of AD-1446268 and the second dsRNA agent comprises the antisense strand and/or the sense strand of AD-1285234.

[0240] In one embodiment, the sense strand, the antisenses strand, or both the sense strand and the antisense strand is conjugated to one or more lipophilic moieties.

[0241] In one embodiment, the lipophilic moiety is conjugated to one or more internal positions in the double stranded region of the first dsRNA agent, the second dsRNA agent or both the first and second dsRNA agent.

[0242] In one embodiment, the lipophilic moiety is conjugated to the first dsRNA agent, the second dsRNA agent or both the first and second dsRNA agent via a linker or carrier.

[0243] In one embodiment, lipophilicity of the lipophilic moiety, measured by logKow, conjugated to the first dsRNA agent, the second dsRNA agent or both the first and second dsRNA agent exceeds 0.

[0244] In one embodiment, the hydrophobicity of the first dsRNA agent, the second dsRNA agent or both the first and the second dsRNA agents, measured by the unbound fraction in a plasma protein binding assay of the dsRNA agent, exceeds 0.2.

[0245] In one embodiment, the plasma protein binding assay is an electrophoretic mobility shift assay using human serum albumin protein.

[0246] In one embodiment, the first dsRNA agent, the second dsRNA agent or both the first and second dsRNA agents comprise at least one modified nucleotide.

[0247] In one embodiment, no more than five of the sense strand nucleotides and no more than five of the antisense strand nucleotides of the first dsRNA agent, the second dsRNA agent or both the first and second dsRNA agent are unmodified nucleotides.

[0248] In one embodiment, all of the nucleotides of the sense strand and all of the nucleotides of the antisense strand of the first dsRNA agent, the second dsRNA agent or both the first and second dsRNA agent are modified nucleotides.

[0249] In one embodiment, at least one of the modified nucleotides is selected from the group consisting of a deoxy-nucleotide, a 3′-terminal deoxy-thymine (dT) nucleotide, a 2′-O-methyl modified nucleotide, a 2′-fluoro modified nucleotide, a 2′-deoxy-modified nucleotide, a 2′-O-hexadecyl nucleotide, a 2′-phosphate nucleotide, a locked nucleotide, an unlocked nucleotide, a conformationally restricted nucleotide, a constrained ethyl nucleotide, an abasic nucleotide, an inverted abasic residue, a 2′-amino-modified nucleotide, a 2′-O-allyl-modified nucleotide, 2′-C-alkyl-modified nucleotide, 2′-hydroxy-modified nucleotide, a 2′-methoxyethyl modified nucleotide, a 2′-O-alkyl-modified nucleotide, 2′,3′-seco-modified nucleotide, a morpholino nucleotide, a phosphoramidate, a non-natural base comprising nucleotide, a tetrahydropyran modified nucleotide, a 1.5-anhydrohexitol modified nucleotide, a cyclohexenyl modified nucleotide, a nucleotide comprising a 5′-phosphorothioate group, a nucleotide comprising a 5′-methylphosphonate group, a nucleotide comprising a 5′ phosphate or 5′ phosphate mimic, a nucleotide comprising vinyl phosphonate, a glycol modified nucleic acid (GNA), a nucleotide comprising adenosine-glycol nucleic acid (GNA), a nucleotide comprising thymidine-glycol nucleic acid (GNA)S-Isomer, a nucleotide comprising 2-hydroxymethyl-tetrahydrofuran-5-phosphate, a nucleotide comprising 2′-deoxythymidine-3′phosphate, a nucleotide comprising 2′-deoxyguanosine-3′-phosphate, and a terminal nucleotide linked to a cholesteryl derivative and a dodecanoic acid bisdecylamide group; and combinations thereof.

[0250] In one embodiment, the modified nucleotide is selected from the group consisting of a 2′-deoxy-2′-fluoro modified nucleotide, a 2′-deoxy-modified nucleotide, 3′-terminal deoxy-thymine nucleotides (dT), a locked nucleotide, 2′-O-hexadecyl nucleotide, a 2′-phosphate nucleotide, a glycol nucleotide, a vinyl-phosphonate nucleotide, an abasic nucleotide, a 2′-amino-modified nucleotide, a 2′-alkyl-modified nucleotide, a morpholino nucleotide, a phosphoramidate, and a non-natural base comprising nucleotide.

[0251] In one embodiment, the modified nucleotide comprises a short sequence of 3′-terminal deoxy-thymine nucleotides (dT).

[0252] In one embodiment, the modified nucleotides are independently selected from the group consisting of: 2′-O-methyl modified nucleotides, GNA modified nucleotides, 2′-O-hexadecyl modified nucleotides, 2′-phosphate modified nucleotides, vinyl-phosphonate modified nucleotides, and 2′fluoro modified nucleotides.

[0253] In one embodiment, the first dsRNA agent, the second dsRNA agent or both the first and second dsRNA agents comprise at least one phosphorothioate internucleotide linkage.

[0254] In one embodiment, the first dsRNA agent, the second dsRNA agent or both the first and second dsRNA agents comprise 6-8 phosphorothioate internucleotide linkages.

[0255] In one embodiment, each strand of the first dsRNA agent, the second dsRNA agent or both the first and second dsRNA agents is no more than 30 nucleotides in length.

[0256] In one embodiment, at least one strand of the first dsRNA agent, the second dsRNA agent or both the first and second dsRNA agents comprises a 3′ overhang of at least 1 nucleotide.

[0257] In one embodiment, at least one strand of the first dsRNA agent, the second dsRNA agent or both the first and second dsRNA agents comprise a 3′ overhang of at least 2 nucleotides.

[0258] In one embodiment, the double stranded region of the first dsRNA agent, the second dsRNA agent or both the first and second dsRNA agent is 15-30 nucleotide pairs in length.

[0259] In one embodiment, the double stranded region of the first dsRNA agent, the second dsRNA agent or both the first and second dsRNA agent is 17-23 nucleotide pairs in length.

[0260] In one embodiment, the double stranded region of the first dsRNA agent, the second dsRNA agent or both the first and second dsRNA agents is 17-25 nucleotide pairs in length.

[0261] In one embodiment, the double stranded region of the first dsRNA agent, the second dsRNA agent or both the first and second dsRNA agents is 23-27 nucleotide pairs in length.

[0262] In one embodiment, the double stranded region of the first dsRNA agent, the second dsRNA agent or both the first and second dsRNA agents is 19-21 nucleotide pairs in length.

[0263] In one embodiment, the double stranded region of the first dsRNA agent, the second dsRNA agent or both the first and second dsRNA agents is 21-23 nucleotide pairs in length.

[0264] In one embodiment, each strand of the first dsRNA agent, the second dsRNA agent or both the first and second dsRNA agents is 19-30 nucleotides in length.

[0265] In one embodiment, each strand of the first dsRNA agent, the second dsRNA agent or both the first and second dsRNA agents is 19-23 nucleotides in length.

[0266] In one embodiment, each strand of the first dsRNA agent, the second dsRNA agent or both the first and second dsRNA agents is 21-23 nucleotides in length.

[0267] In one embodiment, the one or more lipophilic moieties are conjugated to one or more internal positions on at least one strand of the first dsRNA agent, the second dsRNA agent or both the first and second dsRNA agents via a linker or carrier.

[0268] In one embodiment, the internal positions of the first dsRNA agent, the second dsRNA agent or both the first and second dsRNA agents include any positions except the terminal two positions from each end of the at least one strand.

[0269] In one embodiment, the internal positions of the first dsRNA agent, the second dsRNA agent or both the first and second dsRNA agents include any positions except the terminal three positions from each end of the at least one strand.

[0270] In one embodiment, the internal positions of the first dsRNA agent, the second dsRNA agent or both the first and second dsRNA agents exclude a cleavage site region of the sense strand.

[0271] In one embodiment, the internal positions of the first dsRNA agent, the second dsRNA agent or both the first and second dsRNA agents include any positions except positions 9-12, counting from the 5′-end of the sense strand.

[0272] In one embodiment, the internal positions of the first dsRNA agent, the second dsRNA agent or both the first and second dsRNA agents include any positions except positions 11-13, counting from the 3′-end of the sense strand.

[0273] In one embodiment, the internal positions of the first dsRNA agent, the second dsRNA agent or both the first and second dsRNA agents exclude a cleavage site region of the antisense strand.

[0274] In one embodiment, the internal positions of the first dsRNA agent, the second dsRNA agent or both the first and second dsRNA agents include any positions except positions 12-14, counting from the 5′-end of the antisense strand.

[0275] In one embodiment, the internal positions of the first dsRNA agent, the second dsRNA agent or both the first and second dsRNA agents include any positions except positions 11-13 on the sense strand, counting from the 3′-end, and positions 12-14 on the antisense strand, counting from the 5′-end.

[0276] In one embodiment, the one or more lipophilic moieties are conjugated to one or more of the internal positions of the first dsRNA agent, the second dsRNA agent or both the first and second dsRNA agents selected from the group consisting of positions 4-8 and 13-18 on the sense strand, and positions 6-10 and 15-18 on the antisense strand, counting from the 5′ end of each strand.

[0277] In one embodiment, the one or more lipophilic moieties are conjugated to one or more of the internal positions of the first dsRNA agent, the second dsRNA agent or both the first and second dsRNA agents selected from the group consisting of positions 5, 6, 7, 15, and 17 on the sense strand, and positions 15 and 17 on the antisense strand, counting from the 5′-end of each strand.

[0278] In one embodiment, the internal positions in the double stranded region of the first dsRNA agent, the second dsRNA agent or both the first and second dsRNA agents exclude a cleavage site region of the sense strand.

[0279] In one embodiment, the sense strand is 21 nucleotides in length, the antisense strand is 23 nucleotides in length, and the lipophilic moiety is conjugated to position 21, position 20, position 15, position 1, position 7, position 6, or position 2 of the sense strand or position 16 of the antisense strand, counting from the 5′-end.

[0280] In one embodiment, the lipophilic moiety is conjugated to the first dsRNA agent, the second dsRNA agent or both the first and second dsRNA agents at position 21, position 20, position 15, position 1, or position 7 of the sense strand, counting from the 5′-end.

[0281] In one embodiment, the lipophilic moiety is conjugated to the first dsRNA agent, the second dsRNA agent or both the first and second dsRNA agents at position 21, position 20, or position 15 of the sense strand, counting from the 5′-end.

[0282] In one embodiment, the lipophilic moiety is conjugated to the first dsRNA agent, the second dsRNA agent or both the first and second dsRNA agents at position 20 or position 15 of the sense strand, counting from the 5′-end.

[0283] In one embodiment, the lipophilic moiety is conjugated to the first dsRNA agent, the second dsRNA agent or both the first and second dsRNA agents at position 16 of the antisense strand, counting from the 5′-end.

[0284] In one embodiment, the lipophilic moiety conjugated to the first dsRNA agent, the second dsRNA agent or both the first and second dsRNA agents is an aliphatic, alicyclic, or polyalicyclic compound.

[0285] In one embodiment, the lipophilic moiety is selected from the group consisting of lipid, cholesterol, retinoic acid, cholic acid, adamantane acetic acid, 1-pyrene butyric acid, dihydrotestosterone, 1,3-bis-O(hexadecyl)glycerol, geranyloxyhexyanol, hexadecylglycerol, borneol, menthol, 1,3-propanediol, heptadecyl group, palmitic acid, myristic acid, 03-(oleoyl)lithocholic acid, O3-(oleoyl)cholenic acid, dimethoxytrityl, or phenoxazine.

[0286] In one embodiment, the lipophilic moiety contains a saturated or unsaturated C4-C30 hydrocarbon chain, and an optional functional group selected from the group consisting of hydroxyl, amine, carboxylic acid, sulfonate, phosphate, thiol, azide, and alkyne.

[0287] In one embodiment, the lipophilic moiety contains a saturated or unsaturated C6-C18 hydrocarbon chain.

[0288] In one embodiment, the lipophilic moiety contains a saturated or unsaturated C16 hydrocarbon chain.

[0289] In one embodiment, the saturated or unsaturated C16 hydrocarbon chain is conjugated to position 6, counting from the 5′-end of the strand.

[0290] In one embodiment, the lipophilic moiety is conjugated to the first dsRNA agent, the second dsRNA agent or both the first and second dsRNA agents via a carrier that replaces one or more nucleotide(s) in the internal position(s) or the double stranded region.

[0291] In one embodiment, the carrier is a cyclic group selected from the group consisting of pyrrolidinyl, pyrazolinyl, pyrazolidinyl, imidazolinyl, imidazolidinyl, piperidinyl, piperazinyl, [1,3]dioxolanyl, oxazolidinyl, isoxazolidinyl, morpholinyl, thiazolidinyl, isothiazolidinyl, quinoxalinyl, pyridazinonyl, tetrahydrofuranyl, and decalinyl; or is an acyclic moiety based on a serinol backbone or a diethanolamine backbone.

[0292] In one embodiment, the lipophilic moiety is conjugated to the double-stranded iRNA agent of the first dsRNA agent, the second dsRNA agent or both the first and second dsRNA agents via a linker containing an ether, thioether, urea, carbonate, amine, amide, maleimide-thioether, disulfide, phosphodiester, sulfonamide linkage, a product of a click reaction, or carbamate.

[0293] In one embodiment, the lipophilic moiety is conjugated to a nucleobase, sugar moiety, or internucleosidic linkage of the first dsRNA agent, the second dsRNA agent or both the first and second dsRNA agents.

[0294] In one embodiment, the lipophilic moiety or targeting ligand is conjugated to the first dsRNA agent, the second dsRNA agent or both the first and second dsRNA agents via a bio-cleavable linker selected from the group consisting of DNA, RNA, disulfide, amide, functionalized monosaccharides or oligosaccharides of galactosamine, glucosamine, glucose, galactose, mannose, and combinations thereof.

[0295] In one embodiment, the 3′ end of the sense strand the first dsRNA agent, the second dsRNA agent or both the first and second dsRNA agents is protected via an end cap which is a cyclic group having an amine, said cyclic group being selected from the group consisting of pyrrolidinyl, pyrazolinyl, pyrazolidinyl, imidazolinyl, imidazolidinyl, piperidinyl, piperazinyl, [1,3]dioxolanyl, oxazolidinyl, isoxazolidinyl, morpholinyl, thiazolidinyl, isothiazolidinyl, quinoxalinyl, pyridazinonyl, tetrahydrofuranyl, and decalinyl.

[0296] In one embodiment, the first dsRNA agent, the second dsRNA agent or both the first and second dsRNA agents further comprises a targeting ligand that targets a neuronal cell, a cell in a neuronal tissue, or a cell in a central nervous system tissue, or a liver tissue.

[0297] In one embodiment, the targeting ligand is a GalNAc conjugate.

[0298] In one embodiment, the first dsRNA agent, the second dsRNA agent or both the first and second dsRNA agents further comprises a terminal, chiral modification occurring at the first internucleotide linkage at the 3′ end of the antisense strand, having the linkage phosphorus atom in Sp configuration, a terminal, chiral modification occurring at the first internucleotide linkage at the 5′ end of the antisense strand, having the linkage phosphorus atom in Rp configuration, and a terminal, chiral modification occurring at the first internucleotide linkage at the 5′ end of the sense strand, having the linkage phosphorus atom in either Rp configuration or Sp configuration.

[0299] In one embodiment, the first dsRNA agent, the second dsRNA agent or both the first and second dsRNA agents further comprises a terminal, chiral modification occurring at the first and second internucleotide linkages at the 3′ end of the antisense strand, having the linkage phosphorus atom in Sp configuration, a terminal, chiral modification occurring at the first internucleotide linkage at the 5′ end of the antisense strand, having the linkage phosphorus atom in Rp configuration, and a terminal, chiral modification occurring at the first internucleotide linkage at the 5′ end of the sense strand, having the linkage phosphorus atom in either Rp or Sp configuration.

[0300] In one embodiment, the first dsRNA agent, the second dsRNA agent or both the first and second dsRNA agents further comprises a terminal, chiral modification occurring at the first, second and third internucleotide linkages at the 3′ end of the antisense strand, having the linkage phosphorus atom in Sp configuration, a terminal, chiral modification occurring at the first internucleotide linkage at the 5′ end of the antisense strand, having the linkage phosphorus atom in Rp configuration, and a terminal, chiral modification occurring at the first internucleotide linkage at the 5′ end of the sense strand, having the linkage phosphorus atom in either Rp or Sp configuration.

[0301] In one embodiment, the first dsRNA agent, the second dsRNA agent or both the first and second dsRNA agents further comprises a terminal, chiral modification occurring at the first, and second internucleotide linkages at the 3′ end of the antisense strand, having the linkage phosphorus atom in Sp configuration, a terminal, chiral modification occurring at the third internucleotide linkages at the 3′ end of the antisense strand, having the linkage phosphorus atom in Rp configuration, a terminal, chiral modification occurring at the first internucleotide linkage at the 5′ end of the antisense strand, having the linkage phosphorus atom in Rp configuration, and a terminal, chiral modification occurring at the first internucleotide linkage at the 5′ end of the sense strand, having the linkage phosphorus atom in either Rp or Sp configuration.

[0302] In one embodiment, the first dsRNA agent, the second dsRNA agent or both the first and second dsRNA agents further comprises a terminal, chiral modification occurring at the first, and second internucleotide linkages at the 3′ end of the antisense strand, having the linkage phosphorus atom in Sp configuration, a terminal, chiral modification occurring at the first, and second internucleotide linkages at the 5′ end of the antisense strand, having the linkage phosphorus atom in Rp configuration, and a terminal, chiral modification occurring at the first internucleotide linkage at the 5′ end of the sense strand, having the linkage phosphorus atom in either Rp or Sp configuration.

[0303] In one embodiment, the first dsRNA agent, the second dsRNA agent or both the first and second dsRNA agents further comprises a phosphate or phosphate mimic at the 5′-end of the antisense strand.

[0304] In one embodiment, the phosphate mimic is a 5′-vinyl phosphonate (VP).

[0305] In one embodiment, the base pair at the 1 position of the 5′-end of the antisense strand of the duplex of the first dsRNA agent, the second dsRNA agent or both the first and second dsRNA agents is an AU base pair.

[0306] In one embodiment, the sense strand is 21 nucleotides in length and the antisense strand is 23 nucleotides in length.

[0307] The present invention also provides cells comprising a composition of the invention.

[0308] In some embodiments, the compositions of the invention are pharmaceutical compositions and, in some embodiments, comprise a lipid formulation.

[0309] In one aspect, the present invention provides a method of reducing the level of one or more C9orf72 RNA transcripts, such as a C9orf72 RNA containing a hexanucleotide-repeat, such as a C9orf72 gene comprising multiple contiguous copies of a hexanucleotide repeat, in a cell, e.g., a neuron, such as a motor neuron, the method comprising contacting the cell with a dsRNA agent of the invention, two or more, e.g., 2, 3, or 4, dsRNA agents of the invention, a composition comprising two or more, e.g., 2, 3, or 4, dsRNA agents for inhibiting expression of one or more C9orf72 RNA transcripts, e.g., a first dsRNA agent targeting a C9orf72 sense transcript (an exon or intron of C9orf72) and a second dsRNA agent targeting an C9orf72 antisense transcript (an exon or intron of C9orf72) as described herein, or a pharmaceutical composition of the invention, thereby inhibiting expression of the C9orf72 gene in the cell.

[0310] In another aspect, the present invention provides methods of reducing dipeptide repeat protein synthesis or dipeptide repeat protein aggregates in a cell. The methods include introducing into the cell a dsRNA agent of the invention, two or more, e.g., 2, 3, or 4, dsRNA agents of the invention, a composition comprising two or more, e.g., 2, 3, or 4, dsRNA agents for inhibiting expression of one or more C9orf72 RNA transcripts, e.g., a first dsRNA agent targeting a C9orf72 sense transcript (an exon or intron of C9orf72) and a second dsRNA agent targeting a C9orf72 antisense transcript (an exon or intron of C9orf72) as described herein, or a pharmaceutical composition of the invention, thereby reducing dipeptide repeat protein synthesis or dipeptide repeat protein aggregates in the cell.

[0311] In another aspect, the present invention provides methods of reducing accumulation or aggregation of poly(glycine-alanine) peptides, poly(glycine-proline) peptides, poly(glycine-arginine) peptides, poly(alanine-proline) peptides, or poly(proline-arginine) peptides in a cell. The methods include introducing into the cell a dsRNA agent of the invention, two or more, e.g., 2, 3, or 4, dsRNA agents of the invention, a composition comprising two or more, e.g., 2, 3, or 4, dsRNA agents for inhibiting expression of C9orf72, e.g., a first dsRNA agent targeting a C9orf72 sense transcript (an exon or intron of C9orf72) and a second dsRNA agent targeting a C9orf72 antisense transcript (an exon or intron of C9orf72) as described herein, or a pharmaceutical composition of the invention, thereby reducing accumulation or aggregation of poly(glycine-alanine) peptides, poly(glycine-proline) peptides, poly(glycine-arginine) peptides, poly(alanine-proline) peptides, or poly(proline-arginine) peptides in the cell.

[0312] In another aspect, the present invention provides methods of reducing repeat-length-dependent formation of C9orf72 RNA foci in a cell. The methods include introducing into the cell a dsRNA agent of the invention, two or more, e.g., 2, 3, or 4, dsRNA agents of the invention, a composition comprising two or more, e.g., 2, 3, or 4, dsRNA agents for inhibiting expression of C9orf72, e.g., a first dsRNA agent targeting a C9orf72 sense transcript (an exon or intron of C9orf72) and a second dsRNA agent targeting a C9orf72 antisense transcript (an exon or intron of C9orf72) as described herein, or a pharmaceutical composition of the invention, thereby reducing repeat-length-dependent formation of C9orf72 RNA foci in the cell.

[0313] In another aspect, the present invention provides methods of reducing nuclear and/or cytoplasmic sense and/or antisense C9orf72 RNA foci in a cell. The methods include introducing into the cell a dsRNA agent of the invention, two or more, e.g., 2, 3, or 4, dsRNA agents of the invention, a composition comprising two or more, e.g., 2, 3, or 4, dsRNA agents for inhibiting expression of C9orf72, e.g., a first dsRNA agent targeting a C9orf72 sense transcript (an exon or intron of C9orf72) and a second dsRNA agent targeting a C9orf72 antisense transcript (an exon or intron of C9orf72) as described herein, or a pharmaceutical composition of the invention, thereby reducing nuclear and/or cytoplasmic sense and/or antisense C9orf72 RNA foci in the cell.

[0314] In one embodiment, cell is within a subject.

[0315] In one embodiment, the subject is a human.

[0316] In one embodiment, the subject has or is at risk of developing a C9orf72-associated disorder, such as a C9orf72-hexanucleotide-repeat-expansion-associated disease, condition, or disorder.

[0317] In one embodiment, the C9orf72-associated disorder is selected from the group consisting of C9orf72 amyotrophic lateral sclerosis, frontotemporal dementia, Hungtinton's disease Huntington-Like Syndrome Due To C9orf72 hexanucletoide repeat expansions, parkinsonism, olivopontocerebellar degeneration, corticobasal syndrome, and Alzheimer's disease.

[0318] In one embodiment, ontacting the cell with the dsRNA agent inhibits the levels of sense and/or antisense hexanucleotide-repeat-containing C9orf72 RNA transcripts by at least 50%, 60%, 70%, 80%, 90%, or 95%.

[0319] In one embodiment, inhibiting the levels of sense and/or antisense hexanucleotide-repeat-containing C9orf72 RNA transcripts decreases the level of one or more aberrant dipeptide-repeat (DPR) proteins selected from the group consisting of poly(glycine-alanine), poly(glycine-arginine), poly(glycine-proline), poly(proline-alanine), and poly(proline-arginine) by at least 50%, 60%, 70%, 80%, 90%, or 95%.

[0320] In one embodiment, contacting the cell with the dsRNA agent inhibits the expression of C9orf72 mRNA by no more than 50%, 40%, 30%, 20%, 10% or 5%.

[0321] In one embodiment, the dsRNA agent inhibits expression of a C9orf72 target mRNA comprising the hexanucleotide repeat by at least 10%, at least 20%, at least 30%, at least 40%, at least 50%, or at least 60% within 24-48 hours after administration to a cell expressing the C9orf72 target RNA comprising the hexanucleotide repeat.

[0322] In some embodiments, the dsRNA agent selectively inhibits expression of a C9orf72 target RNA comprising the hexanucleotide repeat relative to expression of a mature C9orf72 messenger RNA. In other embodiments, the dsRNA agent inhibits expression of a mature C9orf72 messenger RNA by less than 50%, less than 40%, less than 30%, less than 20%, or less than 10% within 24-48 hours after administration to a cell expressing the mature C9orf72 messenger RNA.

[0323] In some embodiments, the dsRNA agent reduces dipeptide repeat (poly(GA), poly(GR), poly(GP), poly(PA), and/or poly(PR)) protein synthesis or dipeptide repeat (poly(GA), poly(GR), poly(GP), poly(PA), and/or poly(PR)) protein aggregates in the cell.

[0324] In some embodiments, the dsRNA agent reduces nuclear and/or cytoplasmic sense and/or antisense C9orf72 RNA foci in the cell.

[0325] In one embodiment, inhibiting expression of C9orf72 decreases C9orf72 protein level in serum of the subject by no more than 50%, 40%, 30%, 20%, 10% or 5%.

[0326] In some embodiments, the dsRNA agent reduces dipeptide repeat (poly(GA), poly(GR), poly(GP), poly(PA), and/or poly(PR)) protein synthesis or dipeptide repeat (poly(GA), poly(GR), poly(GP), poly(PA), and/or poly(PR)) protein aggregates by at least 10%, at least 20%, at least 30%, at least 40%, at least 50%, at least 60%, at least 70%, or at least 80% within 24-48 hours after administration to the cell.

[0327] In one aspect, the present invention provides methods of treating a subject having a disorder that would benefit from knocking down a target C9orf72 RNA, such as a C9orf72-hexanucleotide-repeat-expansion-associated disease, condition, or disorder, comprising administering to the subject a therapeutically effective amount of a dsRNA agent of the invention, two or more, e.g., 2, 3, or 4, dsRNA agents of the invention, a composition comprising two or more, e.g., 2, 3, or 4, dsRNA agents for inhibiting expression of one or more C9orf72 RNAs, e.g., a first dsRNA agent targeting a C9orf72 sense strand transcript (an exon or intron of C9orf72) and a second dsRNA agent targeting a C9orf72 antisense strand transcript (an exon or intron of C9orf72) as described herein, or a pharmaceutical composition of the invention, thereby treating the subject having the disorder that would benefit from reduction in C9orf72 expression.

[0328] In another aspect, the present invention provides a method of preventing at least one symptom in a subject having a disorder that would benefit from reduction in expression of a C9orf72 RNA containing a hexanucleotide repeat expansion, such as a C9orf72-hexanucleotide-repeat-expansion-associated disease, condition, or disorder, comprising administering to the subject a prophylactically effective amount of a dsRNA agent of the invention, two or more, e.g., 2, 3, or 4, dsRNA agents of the invention, a composition comprising two or more, e.g., 2, 3, or 4, dsRNA agents for inhibiting expression of C9orf72, e.g., a first dsRNA agent targeting a C9orf72 sense strand transcript (an exon or intron of C9orf72) and a second dsRNA agent targeting a C9orf72 antisense strand transcript (an exon or intron of C9orf72) as described herein, or a pharmaceutical composition of the invention, thereby preventing at least one symptom in the subject having the disorder that would benefit from reduction in C9orf72 expression.

[0329] In one embodiment, the methods include administering a first dsRNA agent targeting a sense strand of C9orf72 (an exon or intron of C9orf72) and a second dsRNA agent targeting an antisense strand of C9orf72 (an exon or intron of C9orf72).

[0330] In some embodiments, suitable agents targeting a sense strand of C9orf72 for use in the methods of the invention comprising two or more dsRNA agents comprise a sense strand and an antisense strand forming a double stranded region selected from the group consisting of
[0331] a) a sense strand comprising at least 15 contiguous nucleotides differing by no more than 3 nucleotides from the nucleotide sequence of SEQ ID NO:1 and an antisense strand comprising a nucleotide sequence comprising at least 15 contiguous nucleotides differing by no more than 3 nucleotides from the corresponding portion of the nucleotide sequence of SEQ ID NO:5,
[0332] b) a sense strand comprising at least 15 contiguous nucleotides differing by no more than 3 nucleotides from the nucleotide sequence of SEQ ID NO: 15 and an antisense strand comprising a nucleotide sequence comprising at least 15 contiguous nucleotides differing by no more than 3 nucleotides from the corresponding portion of the nucleotide sequence of SEQ ID NO: 16,
[0333] c) an antisense strand comprising at least 15 contiguous nucleotides differing by no more than 3 nucleotides from any one of the antisense nucleotide sequences in any one of Tables 5, 6, 10B, and 10D;
[0334] d) a sense strand comprising at least 15 contiguous nucleotides differing by no more than three nucleotides from any one of the nucleotide sequence of nucleotides 1-23; 15-37; 33-55; 37-59; 59-81; 62-84, or 69-91 of SEQ ID NO: 1, and an antisense strand comprising at least 15 contiguous nucleotides from the corresponding nucleotide sequence of SEQ ID NO:5;
[0335] e) a sense strand comprising at least 15 contiguous nucleotides differing by no more than three nucleotides from any one of the nucleotide sequence of nucleotides 5197-5219; 5213-5235; 5223-5245; 5226-5248; 5227-5249; 5228-5250, 5229-5251, 5230-5252, 5231-5253, 5235-5256, 5241-5263; 5245-5267; 5233-5255; 5248-5270; 5539-5561; 5547-5569; 5917-5939; 5936-5958; 5954-5976; 6008-6030; 6021-6043; 6036-6058; 6043-6065; or 6048-6070 of SEQ ID NO: 15, and an antisense strand comprising at least 15 contiguous nucleotides from the corresponding nucleotide sequence of SEQ ID NO:16;
[0336] f) a sense strand comprising at least 15 contiguous nucleotides differing by no more than three nucleotides from any one of the nucleotide sequence of nucleotides 5015-5052; 5017-5040; 5032-5059; 5032-5055; 5033-5055; 5035-5059; 5036-5059; 5058-5087; 5059-5087; 5059-5084; 5064-5087; 5197-5222; 5213-5267; 5223-5252; 5229-5252; 5233-5263; 5516-5570; 5539-5565; 5539-5562; 5545-5570; 5545-5569; 5593-5616; 5883-5950; 5917-5950; 5919-5950; 5923-5950; 5934-5977; 5934-5957; 5938-5977; 5938-5965; 5938-5961; 5947-5977; 5947-5973; 5972-6001; 5973-5997; 6006-6029; 6011-6070; 6011-6039; 6011-6038; 6015-6038; 6019-6045; 6019-6042; 6033-6070; 6035-6065; 6035-6059; or 6040-6063 of SEQ ID NO: 15, and an antisense strand comprising at least 15 contiguous nucleotides from the corresponding nucleotide sequence of SEQ ID NO:16;
[0337] g) a sense strand comprising at least 15 contiguous nucleotides differing by no more than three nucleotides from any one of the nucleotide sequence of nucleotides 15-52; 17-40; 32-59; 32-55; 35-59; 36-59; 58-87; 59-87; 59-84; or 64-87 of SEQ ID NO: 1, and an antisense strand comprising at least 15 contiguous nucleotides from the corresponding nucleotide sequence of SEQ ID NO:5; and
[0338] h) an antisense strand comprising at least 15 contiguous nucleotides differing by no more than 3 nucleotides from any one of the antisense nucleotide sequences in any one of Tables 8 and 9, wherein the sense strand, the antisense strand, or both the sense strand and the antisense strand comprises at least one modified nucleotide.

[0339] In certain embodiments, suitable agents targeting a sense strand of C9orf72, e.g, of a C9orf72 exon or intron sense sequence, for use in the methods of the invention comprising two or more dsRNA agents are those dsRNA agents disclosed in PCT Publication No. WO 2021/119226, the entire contents of which are incorporated herein by reference.

[0340] In certain embodiments, suitable agents targeting an antisense strand of C9orf72 for use in the methods of the invention comprising two or more dsRNA agents comprise a sense strand an an antisense strand forming a double stranded region selected from the group consisting of
[0341] a) a sense strand comprising at least 15 contiguous nucleotides differing by no more than 3 nucleotides from the nucleotide sequence of SEQ ID NO: 13 and an antisense strand comprising a nucleotide sequence comprising at least 15 contiguous nucleotides differing by no more than 3 nucleotides from the corresponding portion of the nucleotide sequence of SEQ ID NO: 14,
[0342] b) a sense strand comprising at least 15 contiguous nucleotides differing by no more than 3 nucleotides from the nucleotide sequence of SEQ ID NO: 17, and an antisense strand comprising a nucleotide sequence comprising at least 15 contiguous nucleotides differing by no more than 3 nucleotides from the corresponding portion of the nucleotide sequence of SEQ ID NO:18,
[0343] c) a sense strand comprising at least 15 contiguous nucleotides differing by no more than 3 nucleotides from the nucleotide sequence of SEQ ID NO: 19, and an antisense strand comprising a nucleotide sequence comprising at least 15 contiguous nucleotides differing by no more than 3 nucleotides from the corresponding portion of the nucleotide sequence of SEQ ID NO:20,
[0344] d) an antisense comprising a nucleotide sequence selected from the group consisting of any of the antisense strand nucleotide sequences in any one of Tables 2, 3, 10C, 10B, 11, and 12; and
[0345] e) a sense strand comprising at least 15 contiguous nucleotides differing by no more than three nucleotides from nucleotides 27573296-27573318; 27573314-27573336; 27573319-27573341; 27573562-27573584; 27573585-27573607; 27573592-27573614; 27573599-27573621; 27573608-27573630; 27573616-27573638; 27573619-27573641; 27573622-27573644; 27573633-27573655; 27573690-27573712; or 27573717-27573739 of SEQ ID NO: 13;
[0346] f) a sense strand comprising at least 15 contiguous nucleotides differing by no more than three nucleotides from any one of the nucleotide sequence of nucleotides 27573296-27573584; 27573296-27573575; 27573301-27573338; 27573318-27573342; 27573555-27573583; 27573581-27573607; 27573584-27573607; 27573588-27573671; 27573588-27573666; 27573588-27573624; 27573592-27573624; 27573592-27573617; 27573598-27573624; 27573599-27573623; 27573606-27573655; 27573606-27573652; 27573606-27573647; 27573654-27573712; or 27573707-27573740 of SEQ ID NO: 13, and an antisense strand comprising at least 15 contiguous nucleotides from the corresponding nucleotide sequence of SEQ ID NO: 14,
[0347] wherein the sense strand, the antisense strand, or both the sense strand and the antisense strand comprises at least one modified nucleotide.

[0348] In one embodiment, the sense strand, the antisense strand, or both the sense strand and the antisense strand is conjugated to one or more lipophilic moieties.

[0349] In one embodiment, the disorder is a C9orf72-associated disorder.

[0350] In one embodiment, the C9orf723-associated disorder is selected from the group consisting of C9orf72 amyotrophic lateral sclerosis, frontotemporal dementia, Huntington's disease Huntington-Like Syndrome Due To C9orf72 Expansions, parkinsonism, olivopontocerebellar degeneration, corticobasal syndrome, and Alzheimer's disease.

[0351] In one embodiment, the subject is human.

[0352] In one embodiment, the administration of the agent to the subject causes a decrease in C9orf72 protein accumulation.

[0353] In some embodiments, the method reduces dipeptide repeat protein synthesis or reduces dipeptide repeat protein aggregates in the subject. In some embodiments, the method decreases expression of a C9orf72 target RNA comprising a hexanucleotide repeat comprising multiple contiguous copies of SEQ ID NO: 1 in the subject.

[0354] In one embodiment, administration of the agent to the subject causes a decrease in the level of one or more dipeptide-repeat (DPR) proteins selected from the group consisting of poly(glycine-alanine), poly(glycine-arginine), poly(glycine-proline), poly(proline-alanine), and poly(proline-arginine).

[0355] In one embodiment, the level of one or more aberrant dipeptide-repeat (DPR) proteins is decreased by more than 50%, 60%, 70%, 80%, 90%, or 95%.

[0356] In one embodiment, the level of poly(glycine-alanine) and/or poly(glycine-proline) is decreased by more than 50%, 60%, 70%, 80%, 90%, or 95%.

[0357] In one embodiment, the dsRNA agent is administered to the subject at a dose of about 0.01 mg/kg to about 50 mg/kg.

[0358] In one embodiment, the dsRNA agent is administered to the subject subcutaneously.

[0359] In another embodiment, the dsRNA agent is administered to the subject intrathecally.
[0360] In yet another embodiment, the dsRNA agent is administered to the subject intracerebroventricularly.

[0361] In one embodiment, the methods of the invention further comprise determining the level of C9orf72 in a sample(s) from the subject.

[0362] In one embodiment, the level of C9orf72 in the subject sample(s) is a C9orf72 protein level in a blood, serum, or cerebrospinal fluid sample(s).

[0363] In one embodiment, the methods of the invention further comprise administering to the subject an additional therapeutic agent.

[0364] In one aspect, the present invention provides a kit comprising any one or more of the dsRNA agents of the invention, a composition of the invention, or a pharmaceutical composition of the invention.

[0365] In another aspect, the present invention provides a vial comprising any one or more of the dsRNA agents of the invention, a compostion of the invention, or a pharmaceutical composition of the invention.

[0366] In yet another aspect, the present invention provides a syringe comprising any one or more of the dsRNA agents of the invention, a composition of the invention, or a pharmaceutical composition of the invention.

[0367] In one embodiment, the RNAi agent is a pharmaceutically acceptable salt thereof. “Pharmaceutically acceptable salts” of each of RNAi agents herein include, but are not limited to, a sodium salt, a calcium salt, a lithium salt, a potassium salt, an ammonium salt, a magnesium salt, an mixtures thereof. One skilled in the art will appreciate that the RNAi agent, when provided as a polycationic salt having one cation per free acid group of the optionally modified phosophodiester backbone and/or any other acidic modifications (e.g., 5′-terminal phosphonate groups). For example, an oligonucleotide of “n” nucleotides in length contains n-1 optionally modified phosophodiesters, so that an oligonucleotide of 21 nt in length may be provided as a salt having up to 20 cations (e.g., 20 sodium cations). Similarly, an RNAi agents having a sense strand of 21 nt in length and an antisense strand of 23 nt in length may be provided as a salt having up to 42 cations (e.g., 42 sodium cations). In the preceding example, where the RNAi agent also includes a 5′-terminal phosphate or a 5′-terminal vinylphosphonate group, the RNAi agent may be provided as a salt having up to 44 cations (e.g., 44 sodium cations).

### BRIEF DESCRIPTION OF THE FIGURES

[0368] FIG. 1 is a graph showing the results of a single dose screen in Cos-7 cells of the indicated agents at 10 nM. 1 nM, or 0.1 nM final concentration.

[0369] FIG. 2 is a graph showing the results of a subset of the agents from FIG. 1 selected for further analysis based on the single dose screen in Cos-7 cells at 10 nM, 1 nM, or 0.1 nM final concentration.

[0370] FIG. 3 is a graph showing the results of a single dose screen in Cos-7 cells of the indicated agents at 10 nM. 1 nM, or 0.1 nM final concentration.

[0371] FIG. 4 is a graph showing the results of a subset of the agents from FIG. 3 selected for further analysis based on the single dose screen in Cos-7 cells at 10 nM, 1 nM, or 0.1 nM final concentration.

[0372] FIGS. 5A-5B are graphs depicting the effect of duplexes of interest on the accumulation of C9orf72 RNA. Embryonic stem cells carrying an approximately 300X G4C2 repeat expansion were electroporated with 1 μM of two different dsRNA agents targeting sense RNA (solid dark bars) or two different dsRNA agents targeting antisense RNA (white bars) transcribed from the region of the C9orf72 gene between exon 1A and the repeat expansion, or a combination of the sense RNA targeting siRNA-1 (AD1285238.1) and one of each antisense targeting siRNA (hatched bars). Knockdown of transcripts that contain sequences derived from the region of the C9orf72 gene between exon 1A and the repeat expansion (FIG. 5A) was assayed by RT-qPCR with an assay that detects sequence from this region. Note that this assay detects predominantly sense RNA because the antisense RNA level is one-eighth that of the sense RNA. C9orf72 spliced mRNA (FIG. 5B) was assayed by RT-qPCR with an assay that recognizes RNAs that contain sequences that span the junction of exons 2 and 3. Data were normalized to the average of two control samples (black bars) treated with the vehicle, artificial cerebral spinal fluid (aCSF).

[0373] FIG. 6A-6C are western slot blots (FIG. 6A) and graphs of the quantification of the blots (FIGS. 6B and 6C) depicting the effect of duplexes of interest on the levels of dipeptide repeat proteins. Embryonic stem cells carrying an approximately 300X G4C2 repeat expansion were electroporated with 1 μM of two different dsRNA agents targeting the sense RNA (solid dark bars, FIGS. 6B-6C), antisense RNA (white bars, FIGS. 6B-6C), or in combination as in FIG. 5 (hatched bars, FIGS. 6B-6C). Levels of dipeptide repeat proteins following knockdown were assayed with antibodies against poly(GlyAla) (right panel FIG. 6A) and poly(GlyPro) (left panel FIG. 6A). Relative proteins levels for poly(GlyPro) (FIG. 6B) and poly(GlyAla) (FIG. 6C) following siRNA treatment were quantitated and normalized to samples treated with aCSF. FIG. 6A discloses SEQ ID NO: 100.

[0374] FIG. 7 is a graph depicting the percent C9orf72 mRNA remaining following intrathecal administration of a single 3 mg/kg dose of the indicated duplexes or PBS.

[0375] FIG. 8 is a graph depicting the use of Nanostring probes for mapping of the transcription start site in C9orf72 antisense RNA. FIG. 8 discloses SEQ ID NO: 100.

### DETAILED DESCRIPTION OF THE INVENTION

[0376] The present disclosure provides RNAi compositions, which affect the RNA-induced silencing complex (RISC)-mediated cleavage of RNA transcripts of a C9orf72 gene, such as a C9orf72 gene having an expanded GGGGCC (G₄C₂) repeat (SEQ ID NO: 100). The C9orf72 gene may be within a cell. e.g., a cell within a subject, such as a human. The use of these iRNAs enables the targeted degradation of RNAs of the corresponding gene (C9orf72 gene) in mammals.

[0377] The iRNAs of the invention have been designed to target a C9orf72 target RNA. e.g., a C9orf72 target RNA having an expanded GGGGCC (SEQ ID NO: 100), hexanucleotide repeat in an intron of the gene. The agents may target a mature C9orf72 mRNA (an mRNA having the introns spliced out) or a C9orf7 mRNA precursor (an mRNA containing introns). In certain aspects of the invention, the RNAi agents of the disclosure may target a C9orf72 sense and/or antisense RNA transcript containing a hexanucleotide-repeat (an RNA containing C9orf72 intron 1A). Targeting a C9orf72 sense and/or antisense strand RNA containing a hexanucleotide-repeat can inhibit expression of or reduce the presence of aberrant dipeptide-repeat (DPR) proteins (poly(GA), poly(GR), poly(GP), poly(PA), and poly(PR)), which are produced from all reading frames of either sense or antisense repeat-containing C9orf72 RNAs through repeat-associated non-AUG-dependent (RAN) translation, in cells of the nervous systems of subjects having a C9orf72-associated disease. In some embodiments, a combination of an RNA agent targeting a C9orf72 sense strand RNA containing a hexanucleotide-repeat and an RNA agent targeting a C9orf72 antisense strand RNA containing a hexanucleotide-repeat are provided together.

[0378] The described iRNAs may have one or more nucleotide modifications or combination of nucleotide modifications that increase activity, delivery, and/or stability of the iRNAs.

[0379] In some embodiments, the iRNAs of the invention inhibit the expression of the C9orf72 gene (e.g., mature mRNA) by no more than about 50%, and reduce the level of sense- and antisense-containing C9orf72 RNA foci, reduce the level of one or more aberrant dipeptide-repeat (DPR) proteins (poly(GA), poly(GR), poly(GP), poly(PA), and poly(PR)), and/or decrease the expression of the C9orf72 sense and/or antisense RNA containing a hexanucleotide-repeat by more than about 50%. Without intending to be limited by theory, it is believed that a combination or sub-combination of the foregoing properties and the specific target sites, or the specific modifications in these iRNAs confer to the iRNAs of the invention improved efficacy, stability, potency, durability, and safety.

[0380] Accordingly, the present disclosure also provides methods of using the RNAi compositions of the disclosure, including, compositions comprising one or more, e.g., 2, 3, or 4, dsRNA agents of the invention, for knocking down or inhibiting the expression of one or more C9orf72 RNAs or for treating a subject having a disorder that would benefit from knocking down or inhibiting the expression of one or more C9orf72 RNAs, e.g., a C9orf72-associated disease, for example, a disease associated with an expanded GGGGCC hexanucleotide repeat (SEQ ID NO: 100) in an intron of the C9orf72 gene, such as C9orf72 amyotrophic lateral sclerosis, frontotemporal dementia, or Huntington's disease, e.g., Huntington-Like Syndrome Due To C9orf72 Expansions, parkinsonism, olivopontocerebellar degeneration, corticobasal syndrome, or Alzheimer's disease.

[0381] The RNAi agents of the disclosure include an RNA strand (the antisense strand) having a region which is about 30 nucleotides or less in length, e.g., 15-30, 15-29, 15-28, 15-27, 15-26, 15-25, 15-24, 15-23, 15-22, 15-21, 15-20, 15-19, 15-18, 15-17, 18-30, 18-29, 18-28, 18-27, 18-26, 18-25, 18-24, 18-23, 18-22, 18-21, 18-20, 19-30, 19-29, 19-28, 19-27, 19-26, 19-25, 19-24, 19-23, 19-22, 19-21, 19-20, 20-30, 20-29, 20-28, 20-27, 20-26, 20-25, 20-24,20-23, 20-22, 20-21, 21-30, 21-29, 21-28, 21-27, 21-26, 21-25, 21-24, 21-23, or 21-22 nucleotides in length, which region is substantially complementary to at least part of an target RNA transcript of a C9orf72 gene, e.g., a C9orf72 intron. In certain embodiments, the RNAi agents of the disclosure include an RNA strand (the antisense strand) having a region which is about 21-23 nucleotides in length, which region is substantially complementary to at least part of an target RNA transcript of a C9orf72 gene, e.g., a C9orf72 intron.

[0382] As the presence of sense and antisense C9orf72-containing foci as well as the presence of aberrant dipeptide-repeat (DPR) proteins (poly(GA), poly(GR), poly(GP), poly(PA), and poly(PR)) produced from all reading frames of either sense or antisense repeat-containing C9orf72 RNAs through repeat-associated non-AUG-dependent (RAN) translation have been identified in several cell types in the nervous systems of subjects having a C9orf72-associated disease (Lagier-Tourenne, et al. (2013) Proc Natl Acad Sci USA doi/10.1073/pnas.1318835110; Jiang, et al. (2016), in certain aspects of the invention, the RNAi agents of the disclosure include an RNA strand (the antisense strand) having a region which is about 30 nucleotides or less in length, e.g., 15-30, 15-29, 15-28, 15-27, 15-26, 15-25, 15-24, 15-23, 15-22, 15-21, 15-20, 15-19, 15-18, 15-17, 18-30, 18-29, 18-28, 18-27, 18-26, 18-25, 18-24, 18-23, 18-22, 18-21, 18-20, 19-30, 19-29, 19-28, 19-27, 19-26, 19-25, 19-24, 19-23, 19-22, 19-21, 19-20, 20-30, 20-29, 20-28, 20-27, 20-26, 20-25, 20-24,20-23, 20-22, 20-21, 21-30, 21-29, 21-28, 21-27, 21-26, 21-25, 21-24, 21-23, or 21-22 nucleotides in length, which region is substantially complementary to at least part of a target RNA transcript of a C9orf72 gene, e.g., a C9orf72 intron. In certain embodiments, the RNAi agents of the disclosure include an RNA strand (the antisense strand) having a region which is about 21-23 nucleotides in length, which region is substantially complementary to at least part of an target RNA transcript of a C9orf72 gene, e.g., a C9orf72 intron.

[0383] In certain embodiments, the RNAi agents of the disclosure include an RNA strand (the antisense strand) which can include longer lengths, for example up to 66 nucleotides, e.g., 36-66, 26-36, 25-36, 31-60, 22-43, 27-53 nucleotides in length with a region of at least 19 contiguous nucleotides that is substantially complementary to at least a part of an mRNA transcript of a C9orf72 gene. These RNAi agents with the longer length antisense strands preferably include a second RNA strand (the sense strand) of 20-60 nucleotides in length wherein the sense and antisense strands form a duplex of 18-30 contiguous nucleotides.

[0384] The use of these RNAi agents enables the targeted degradation of target RNAs of a C9orf72 gene in mammals. Thus, methods and compositions including these RNAi agents are useful for treating a subject who would benefit by knockdown of a target C9orf72 RNA, a reduction in normal C9orf72 protein and/or or a reduction of the pathogenic dipeptide repeat proteins that are generated from the pathogenic hexnucleotide repeat expansion, such as a subject having a C9orf72-associated disease, such as C9orf72 amyotrophic lateral sclerosis, frontotemporal dementia, Huntington's disease, e.g., Huntington-Like Syndrome Due To C9orf72 Expansions, parkinsonism, olivopontocerebellar degeneration, corticobasal syndrome, or Alzheimer's disease.

[0385] The following detailed description discloses how to make and use compositions containing RNAi agents to inhibit the expression of a C9orf72 gene, as well as compositions and methods for treating subjects having diseases and disorders that would benefit from inhibition or reduction of the expression of the genes.

### I. Definitions

[0386] In order that the present disclosure may be more readily understood, certain terms are first defined. In addition, it should be noted that whenever a value or range of values of a parameter are recited, it is intended that values and ranges intermediate to the recited values are also intended to be part of this disclosure.

[0387] The articles “a” and “an” are used herein to refer to one or to more than one (i.e., to at least one) of the grammatical object of the article. By way of example, “an element” means one element or more than one element, e.g., a plurality of elements.

[0388] The term “including” is used herein to mean, and is used interchangeably with, the phrase “including but not limited to”. The term “or” is used herein to mean, and is used interchangeably with, the term “and/or,” unless context clearly indicates otherwise.

[0389] The term “about” is used herein to mean within the typical ranges of tolerances in the art. For example, “about” can be understood as about 2 standard deviations from the mean. In certain embodiments, about means ±10%. In certain embodiments, about means ±5%. When about is present before a series of numbers or a range, it is understood that “about” can modify each of the numbers in the series or range.

[0390] The term “at least” prior to a number or series of numbers is understood to include the number adjacent to the term “at least”, and all subsequent numbers or integers that could logically be included, as clear from context. For example, the number of nucleotides in a nucleic acid molecule must be an integer. For example, “at least 18 nucleotides of a 21 nucleotide nucleic acid molecule” means that 18, 19, 20, or 21 nucleotides have the indicated property. When at least is present before a series of numbers or a range, it is understood that “at least” can modify each of the numbers in the series or range.

[0391] As used herein, “no more than” or “less than” is understood as the value adjacent to the phrase and logical lower values or integers, as logical from context, to zero. For example, a duplex with an overhang of “no more than 2 nucleotides” has a 2, 1, or 0 nucleotide overhang. When “no more than” is present before a series of numbers or a range, it is understood that “no more than” can modify each of the numbers in the series or range.

[0392] As used herein, methods of detection can include determination that the amount of analyte present is below the level of detection of the method.

[0393] In the event of a conflict between an indicated target site and the nucleotide sequence for a sense or antisense strand, the indicated sequence takes precedence.

[0394] In the event of a conflict between a chemical structure and a chemical name, the chemical structure takes precedence.

[0395] Compositions or methods “comprising” or “including” one or more recited elements may include other elements not specifically recited. For example, a composition that “comprises” or “includes” a protein may contain the protein alone or in combination with other ingredients. The transitional phrase “consisting essentially of” means that the scope of a claim is to be interpreted to encompass the specified elements recited in the claim and those that do not materially affect the basic and novel characteristic(s) of the claimed invention. Thus, the term “consisting essentially of” when used in a claim of this invention is not intended to be interpreted to be equivalent to “comprising.”

[0396] “Optional” or “optionally” means that the subsequently described event or circumstance may or may not occur and that the description includes instances in which the event or circumstance occurs and instances in which the event or circumstance does not.

[0397] The term “C9orf72” gene, also known as “C9orf72-SMCR8 Complex Subunit,” Guaninc Nucleotide Exchange C9orf72.” “Chromosome 9 Open Reading Frame 72, “Protein C9orf72,” “DENNL72,” “FTDALS1,” “ALSFTD”, and “FTDALS,” refers to the gene encoding the well-known protein involved in the regulation of endosomal trafficking, C9orf72. The C9orf72 protein has been shown to interact with Rab proteins that are involved in autophagy and endocytic transport. Expansion of a GGGGCC repeat (SEQ ID NO: 100) from about 2 to about 22 copies to about 700 to about 1600 copies in the intronic sequence between alternate 5′ exons in transcripts from this gene is associated with C9orf72 amyotrophic lateral sclerosis, frontotemporal dementia, Huntington's disease, e.g., Huntington-Like Syndrome Due To C9orf72 Expansions, parkinsonism, olivopontocerebellar degeneration, corticobasal syndrome, or Alzheimer's disease. Alternative splicing results in multiple transcript variants encoding different isoforms.

[0398] Exemplary nucleotide and amino acid sequences of C9orf72 can be found, for example, at GenBank Accession No. NM_001256054.2 (Homo sapiens C9orf72, SEQ ID NO: 1, reverse complement SEQ ID NO:5; GenBank Accession No.: XM_005581570.2 (Macaca fascicularis C9orf72, SEQ ID NO:2, reverse complement SEQ ID NO:6); GenBank Accession No. NM_001081343.2 (Mus musculus C9orf72, SEQ ID NO:3, reverse complement SEQ ID NO:7); and GenBank Accession No.: NM_001007702.1 (Rattus norvegicus C9orf72, SEQ ID NO:4, reverse complement SEQ ID NO:8).

[0399] Additional nucleotide and amino acid sequences of human C9orf72 can be found, for example, at GenBank Accession No. NM_145005.6, transcript variant 1 (SEQ ID NO:9, reverse complement SEQ ID NO: 10); and NM_018325.5, transcript variant 2 (SEQ ID NO:11, reverse complement SEQ ID NO: 12).

[0400] The nucleotide sequence of the genomic region of human chromosome 9 harboring the C9orf72 gene may be found in, for example, the Genome Reference Consortium Human Build 38 (also referred to as Human Genome build 38 or GRCh38) available at GenBank. The nucleotide sequence of the genomic region of human chromosome 9 harboring the C9orf72 gene may also be found at, for example, GenBank Accession No. NC_000009.12 (SEQ ID NO: 13 provides nucleotides 27546546, 27573866 of the assembly of chromosome 9, reverse complement SEQ ID NO:14),. The nucleotide sequence of the human C9orf72 gene may be found in, for example, GenBank Accession No. NG_031977.1 (SEQ ID NO:15, reverese complement, SEQ ID NO:16).

[0401] SEQ ID NO: 13 provides nucleotides 27546546, 27573866 of the assembly of chromosome 9 (NC_000009.12). It will be understood when a range for a target sequence within SEQ ID NO: 13 is provided, the nucleotide position range corresponds the nucleotide positions of the assembly of chromosome 9, e.g., nucleotides 27573086-27573106 of SEQ ID NO: 13 refers to the nucleotide positions within the assembly of human chromosome 9, for which SEQ ID NO: 13 provides nucleotides at positions 27546546, 27573866.

[0402] Further examples of C9orf72 sequences can be found in publicly available databases, for example, GenBank, OMIM, and UniProt.

[0403] Additional information on C9orf72 can be found, for example, at www.ncbi.nlm.nih.gov/gene/203228. The term C9orf72 as used herein also refers to variations of the C9orf72 gene including variants provided in the clinical variant database, for example, at www.ncbi.nlm.nih.gov/clinvar/?term=NM_001256054.2.

[0404] The entire contents of each of the foregoing GenBank Accession numbers and the Gene database numbers are incorporated herein by reference as of the date of filing this application.

[0405] As used herein, “target sequence” refers to a contiguous portion of the nucleotide sequence of an RNA molecule formed during the transcription of a C9orf72 gene, such as a sense or antisense C9orf72 RNA molecule, including mRNA that is a product of RNA processing of a primary transcription product. In one embodiment, the target portion of the sequence will be at least long enough to serve as a substrate for RNAi-directed cleavage at or near that portion of the nucleotide sequence of an mRNA molecule formed during the transcription of a C9orf72 gene. In one embodiment, the target sequence is within the protein coding region of a C9orf72 gene. In another embodiment, the target sequence is within an intron, e.g., the intron between exons 1A and 1B, of a C9orf72 gene. In one embodiment, the target sequence is a sense C9orf72 RNA molecule. In another embodiment, the target sequence is an antisense C9orf72 RNA molecule. In one embodiment, the target sequence comprises a transcription start site, e.g., a transcription start site for an antisense C9orf72 RNA molecule, e.g., about 171 bp downstream of the 3′ end of the exon 1B coding DNA, or approximately 270 bp downstream of the GGGGCC hexanucleotide repeat expansion (SEQ ID NO: 100), e.g., nucleotide 5607 of NG_031977 (SEQ ID NO:15). In some embodiments, the target sequence comprises a region between the transcription start site and exon 1A, e.g., nucleotides 5001-5607, 5026-5607, 5127-5607, or 5130-5607 of NG_031977 (SEQ ID NO: 15). Exons 1A and 1B correspond to positions 5001-5158 and 5386-5436 of NG_031977. In some embodiments, the target sequence comprises a region starting from the transcription start site, extending through the hexanucleotide repeat expansion region, and at least about 200 bp, about 500 bp, about 900 bp, about 1200 bp, or about 1500 bp, or about 2000 bp out into the 5′ flanking sequence of the C9orf72 gene. It is understood that if the nucleotide sequence of a target sequence is provided as, e.g., a cDNA or genomic sequence or the reverse complement of a cDNA or genomic sequence, e.g., SEQ ID NOs: 1-20, the “Ts” are “Us” in the corresponding mRNA sequence.

[0406] A C9orf72 mRNA (target C9orf72 RNA) is an RNA transcribed from a C9orf72 gene, either a sense strand or an antisense strand transcribed message. A C9orf72 RNA includes C9orf72 mature mRNA, a C9orf72 precursor RNA, or any portions thereof (e.g., spliced out intronic regions or alternatively spliced RNAs). C9orf72 mature mRNA is C9orf72 mRNA in which the introns have been removed (spliced out) and from which C9orf72 protein is translated. C9orf72 precursor RNA is C9orf72 RNA in which at least 1 intron, particularly the first intron (intron 1), has not been removed.

[0407] A C9orf72 protein includes any protein expressed from a C9orf72 RNA. A C9orf72 protein includes the protein expressed from C9orf72 mature RNA, as well as dipeptide repeat proteins (e.g., poly(glycine-alanine), poly(glycine-proline), poly(glycine-arginine), poly(alanine-proline), and poly(proline-arginine)) resulting from repeat-associated non-AUG (AUG) translation from C9orf72 RNAs containing hexanucleotide repeats.

[0408] A C9orf72 target RNA may include C9orf72 RNA having a hexanucleotide repeat expansion. The hexanucleotide repeat expansion includes, but is not limited to, multiple contiguous copies of SEQ ID NO: 1 or a sequence having at least 90% identity to multiple contiguous copies of SEQ ID NO: 1. The C9orf72 target RNA includes, but is not limited to, C9orf72 sense and antisense RNA transcripts having a hexanucleotide repeat expansion. The C9orf72 target RNA can be, for example, one with a pathogenic hexanucleotide repeat expansion (having, for example, at least about 30, at least about 35, at least about 40, at least about 50, at least about 60, at least about 70, at least about 80, at least about 100, at least about 200, at least about 300, at least about 400, or at least about 500 copies of the hexanucleotide repeat).

[0409] The target sequence may be about 15-30 nucleotides in length. For example, the target sequence can be from about 15-30 nucleotides, 15-29, 15-28, 15-27, 15-26, 15-25, 15-24, 15-23, 15-22, 15-21, 15-20, 15-19, 15-18, 15-17, 18-30, 18-29, 18-28, 18-27, 18-26, 18-25, 18-24, 18-23, 18-22, 18-21, 18-20, 19-30, 19-29, 19-28, 19-27, 19-26, 19-25, 19-24, 19-23, 19-22, 19-21, 19-20, 20-30, 20-29, 20-28, 20-27, 20-26, 20-25, 20-24,20-23, 20-22, 20-21, 21-30, 21-29, 21-28, 21-27, 21-26, 21-25, 21-24, 21-23, or 21-22 nucleotides in length. In certain embodiments, the target sequence is 19-23 nucleotides in length, optionally 21-23 nucleotides in length. Ranges and lengths intermediate to the above recited ranges and lengths are also contemplated to be part of the disclosure.

[0410] As used herein, the term “strand comprising a sequence” refers to an oligonucleotide comprising a chain of nucleotides that is described by the sequence referred to using the standard nucleotide nomenclature.

[0411] “G.” “C.” “A.” “T”, and “U” each generally stand for a nucleotide that contains guanine, cytosine, adenine, thymidine, and uracil as a base, respectively in the context of a modified or unmodified nucleotide. However, it will be understood that the term “ribonucleotide” or “nucleotide” can also refer to a modified nucleotide, as further detailed below, or a surrogate replacement moiety (see, e.g., Table 1). The skilled person is well aware that guanine, cytosine, adenine, thymidine, and uracil can be replaced by other moieties without substantially altering the base pairing properties of an oligonucleotide comprising a nucleotide bearing such replacement moiety. For example, without limitation, a nucleotide comprising inosine as its base can base pair with nucleotides containing adenine, cytosine, or uracil. Hence, nucleotides containing uracil, guanine, or adenine can be replaced in the nucleotide sequences of dsRNA featured in the disclosure by a nucleotide containing, for example, inosine. In another example, adenine and cytosine anywhere in the oligonucleotide can be replaced with guanine and uracil, respectively to form G-U Wobble base pairing with the target mRNA. Sequences containing such replacement moieties are suitable for the compositions and methods featured in the disclosure.

[0412] The terms “IRNA”, “RNAi agent.” “iRNA agent.” “RNA interference agent” as used interchangeably herein, refer to an agent that contains RNA as that term is defined herein, and which mediates the targeted cleavage of an RNA transcript via an RNA-induced silencing complex (RISC) pathway. RNA interference (RNAi) is a process that directs the sequence-specific degradation of mRNA. RNAi knocks down (i.e., reduces the amount of) or modulates (i.e., inhibits) the expression of C9orf72, a C9orf72-related transcript, or a C9orf72-related peptide (e.g., a dipeptide repeat) in a cell, e.g., a cell within a subject, such as a mammalian subject.

[0413] In one embodiment, an RNAi agent of the disclosure includes a single stranded RNAi that interacts with a target RNA sequence, e.g., a C9orf72 target mRNA sequence (either a sense or an antisense RNA transcript sequence), to direct the cleavage of the target RNA. Without wishing to be bound by theory it is believed that long double stranded RNA introduced into cells is broken down into double-stranded short interfering RNAs (siRNAs) comprising a sense strand and an antisense strand by a Type III endonuclease known as Dicer (Sharp et al. (2001) Genes Dev. 15:485). Dicer, a ribonuclease-III-like enzyme, processes these dsRNA into 19-23 base pair short interfering RNAs with characteristic two base 3′ overhangs (Bernstein, et al., (2001) Nature 409:363). These siRNAs are then incorporated into an RNA-induced silencing complex (RISC) where one or more helicases unwind the siRNA duplex, enabling the complementary antisense strand to guide target recognition (Nykanen, et al., (2001) Cell 107:309). Upon binding to the appropriate target mRNA, one or more endonucleases within the RISC cleave the target to induce silencing (Elbashir, et al., (2001) Genes Dev. 15:188). Thus, in one aspect the disclosure relates to a single stranded RNA (ssRNA) (the antisense strand of a siRNA duplex) generated within a cell and which promotes the formation of a RISC complex to effect silencing of the target gene, i.e., a C9orf72 gene. Accordingly, the term “siRNA” is also used herein to refer to an RNAi as described above.

[0414] In another embodiment, the RNAi agent may be a single-stranded RNA that is introduced into a cell or organism to inhibit a target mRNA. Single-stranded RNAi agents bind to the RISC endonuclease, Argonaute 2, which then cleaves the target mRNA. The single-stranded siRNAs are generally 15-30 nucleotides and are chemically modified. The design and testing of single-stranded RNAs are described in U.S. Pat. No. 8,101,348 and in Lima et al., (2012) Cell 150:883-894, the entire contents of each of which are hereby incorporated herein by reference. Any of the antisense nucleotide sequences described herein may be used as a single-stranded siRNA as described herein or as chemically modified by the methods described in Lima et al., (2012) Cell 150:883-894.

[0415] In another embodiment, a “RNAi agent” for use in the compositions and methods of the disclosure is a double stranded RNA and is referred to herein as a “double stranded RNAi agent.” “double stranded RNA (dsRNA) molecule,” “dsRNA agent,” or “dsRNA”. The term “dsRNA” refers to a complex of ribonucleic acid molecules, having a duplex structure comprising two anti-parallel and substantially complementary nucleic acid strands, referred to as having “sense” and “antisense” orientations with respect to a target RNA, i.e., either a sense strand of a C9orf72 gene or an antisense strand of a C9orf72 gene. In some embodiments of the disclosure, a double stranded RNA (dsRNA) triggers the degradation of a target RNA, e.g., an mRNA, through a post-transcriptional gene-silencing mechanism referred to herein as RNA interference or RNAi.

[0416] The dsRNA agents described herein can differ from (i.e., do not include) antisense oligonucleotides (ASOs) or gapmer antisense oligonucleotides (ASOs).

[0417] In some embodiments, any of the disclosed antisense oligonucleotide sequences described herein can be used alone as an ASO, ribozyme. The ASO can comprise 16-20 contiguous nucleotides from any of the described antisense oligonucleotide sequences. In some embodiments, an ASO targets the same region of a target RNA as any of the described dsRNAs. An ASO can down regulate a target by inducing RNase H endonuclease cleavage of a target RNA, by steric hindrance of ribosomal activity, by inhibiting 5′ cap formation, or by altering splicing. The ASO can be a gapmer or a morpholino. A “Gapmer” is oligonucleotide comprising an internal region having a plurality of nucleosides that support RNase H cleavage positioned between external regions having one or more nucleosides, wherein the nucleosides comprising the internal region are chemically distinct from the nucleoside or nucleosides comprising the external regions. The internal region may be referred to as the “gap” and the external regions may be referred to as the “wings.” A gapmer can have 5′ and 3′ wings each having 2-6 nucleotides and a gap having 7-12 nucleotides. A gapmer can have a 3-10-3 configuration or a 5-10-5 configuration. All of the nucleotides of a gapmer can have phosphorothioate linkages, optionally with one or more chiral mesyl-phosphoramidate or methylphosponate linked nucleotides. The wing nucleotides can be, but are not limited to 2′-O-methoxyethyl (2′-MOE) modified nucleotides, LNA modified nucleotides, cET modified nucleotides or combinations thereof. The gap nucleotides can be deoxyribonucleotides. Any cytosine nucleotides in an ASO may be methyl-cytosines.

[0418] In general, a dsRNA molecule can include ribonucleotides, but as described in detail herein, each or both strands can also include one or more non-ribonucleotides, e.g., a deoxyribonucleotide, a modified nucleotide. In addition, as used in this specification, an “RNAi agent” may include ribonucleotides with chemical modifications; an RNAi agent may include substantial modifications at multiple nucleotides. As used herein, the term “modified nucleotide” refers to a nucleotide having, independently, a modified sugar moiety, a modified internucleotide linkage, or a modified nucleobase. Thus, the term modified nucleotide encompasses substitutions, additions or removal of, e.g., a functional group or atom, to internucleoside linkages, sugar moieties, or nucleobases. The modifications suitable for use in the agents of the disclosure include all types of modifications disclosed herein or known in the art. Any such modifications, as used in a siRNA type molecule, are encompassed by “RNAi agent” for the purposes of this specification and claims.

[0419] In certain embodiments of the instant disclosure, inclusion of a deoxy-nucleotide if present within an RNAi agent can be considered to constitute a modified nucleotide.

[0420] The duplex region may be of any length that permits specific degradation of a desired target RNA through a RISC pathway, and may range from about 15-36 base pairs in length, for example, about 15, 16, 17, 18, 19, 20, 21, 22, 23, 24, 25, 26, 27, 28, 29, 30, 31, 32, 33, 34, 35, or 36 base pairs in length, such as about 15-30, 15-29, 15-28, 15-27, 15-26, 15-25, 15-24, 15-23, 15-22, 15-21, 15-20, 15-19, 15-18, 15-17, 18-30, 18-29, 18-28, 18-27, 18-26, 18-25, 18-24, 18-23, 18-22, 18-21, 18-20, 19-30, 19-29, 19-28, 19-27, 19-26, 19-25, 19-24, 19-23, 19-22, 19-21, 19-20, 20-30, 20-29, 20-28, 20-27, 20-26, 20-25, 20-24,20-23, 20-22, 20-21, 21-30, 21-29, 21-28, 21-27, 21-26, 21-25, 21-24, 21-23, or 21-22 base pairs in length. In certain embodiments, the duplex region is 19-21 base pairs in length, e.g., 21 base pairs in length. Ranges and lengths intermediate to the above recited ranges and lengths are also contemplated to be part of the disclosure.

[0421] The two strands forming the duplex structure may be different portions of one larger RNA molecule, or they may be separate RNA molecules. Where the two strands are part of one larger molecule, and therefore are connected by an uninterrupted chain of nucleotides between the 3′-end of one strand and the 5′-end of the respective other strand forming the duplex structure, the connecting RNA chain is referred to as a “hairpin loop.” A hairpin loop can comprise at least one unpaired nucleotide. In some embodiments, the hairpin loop can comprise at least 4, at least 5, at least 6, at least 7, at least 8, at least 9, at least 10, at least 20, at least 23 or more unpaired nucleotides or nucleotides not directed to the target site of the dsRNA. In some embodiments, the hairpin loop can be 10 or fewer nucleotides. In some embodiments, the hairpin loop can be 8 or fewer unpaired nucleotides. In some embodiments, the hairpin loop can be 4-10 unpaired nucleotides. In some embodiments, the hairpin loop can be 4-8 nucleotides.

[0422] Where the two substantially complementary strands of a dsRNA are comprised by separate RNA molecules, those molecules need not, but can be covalently connected. In certain embodiments where the two strands are connected covalently by means other than an uninterrupted chain of nucleotides between the 3′-end of one strand and the 5′-end of the respective other strand forming the duplex structure, the connecting structure is referred to as a “linker” (though it is noted that certain other structures defined elsewhere herein can also be referred to as a “linker”). The RNA strands may have the same or a different number of nucleotides. The maximum number of base pairs is the number of nucleotides in the shortest strand of the dsRNA minus any overhangs that are present in the duplex. In addition to the duplex structure, an RNAi may comprise one or more nucleotide overhangs. In one embodiment of the RNAi agent, at least one strand comprises a 3′ overhang of at least 1 nucleotide. In another embodiment, at least one strand comprises a 3′ overhang of at least 2 nucleotides, e.g., 2, 3, 4, 5, 6, 7, 9, 10, 11, 12, 13, 14, or 15 nucleotides. In other embodiments, at least one strand of the RNAi agent comprises a 5′ overhang of at least 1 nucleotide. In certain embodiments, at least one strand comprises a 5′ overhang of at least 2 nucleotides, e.g., 2, 3, 4, 5, 6, 7, 9, 10, 11, 12, 13, 14, or 15 nucleotides. In still other embodiments, both the 3′ and the 5′ end of one strand of the RNAi agent comprise an overhang of at least 1 nucleotide.

[0423] In one embodiment, an RNAi agent of the disclosure is a dsRNA, each strand of which independently comprises 19-23 nucleotides, that interacts with a target RNA sequence, e.g., a C9orf72 target mRNA sequence, to direct the cleavage of the target RNA.

[0424] In some embodiments, an iRNA of the invention is a dsRNA of 24-30 nucleotides that interacts with a target RNA sequence, e.g., a C9orf72 target mRNA sequence, to direct the cleavage of the target RNA.

[0425] As used herein, the term “nucleotide overhang” refers to at least one unpaired nucleotide that protrudes from the duplex structure of an RNAi agent, e.g., a dsRNA. For example, when a 3′-end of one strand of a dsRNA extends beyond the 5′-end of the other strand, or vice versa, there is a nucleotide overhang. A dsRNA can comprise an overhang of at least one nucleotide; alternatively, the overhang can comprise at least two nucleotides, at least three nucleotides, at least four nucleotides, at least five nucleotides or more. A nucleotide overhang can comprise or consist of a nucleotide/nucleoside analog, including a deoxynucleotide/nucleoside. The overhang(s) can be on the sense strand, the antisense strand or any combination thereof. Furthermore, the nucleotide(s) of an overhang can be present on the 5′-end, 3′-end or both ends of either an antisense or sense strand of a dsRNA.

[0426] In one embodiment, the antisense strand of a dsRNA has a 1-10 nucleotide, e.g., a 1, 2, 3, 4, 5, 6, 7, 8, 9, or 10 nucleotide, overhang at the 3′-end or the 5′-end. In one embodiment, the sense strand of a dsRNA has a 1-10 nucleotide, e.g., a 1, 2, 3, 4, 5, 6, 7, 8, 9, or 10 nucleotide, overhang at the 3′-end or the 5′-end. In another embodiment, one or more of the nucleotides in the overhang is replaced with a nucleoside thiophosphate.

[0427] In certain embodiments, the antisense strand of a dsRNA has a 1-10 nucleotide, e.g., 0-3, 1-3, 2-4, 2-5, 4-10, 5-10, e.g., a 1, 2, 3, 4, 5, 6, 7, 8, 9, or 10 nucleotide, overhang at the 3′-end or the 5′-end. In one embodiment, the sense strand of a dsRNA has a 1-10 nucleotide, e.g., a 1, 2, 3, 4, 5, 6, 7, 8, 9, or 10 nucleotide, overhang at the 3′-end or the 5′-end. In another embodiment, one or more of the nucleotides in the overhang is replaced with a nucleoside thiophosphate.

[0428] In certain embodiments, the overhang on the sense strand or the antisense strand, can include extended lengths longer than 10 nucleotides, e.g., 1-30 nucleotides, 2-30 nucleotides, 10-30 nucleotides, or 10-15 nucleotides in length. In certain embodiments, an extended overhang is on the sense strand of the duplex. In certain embodiments, an extended overhang is present on the 3′end of the sense strand of the duplex. In certain embodiments, an extended overhang is present on the 5′end of the sense strand of the duplex. In certain embodiments, an extended overhang is on the antisense strand of the duplex. In certain embodiments, an extended overhang is present on the 3′ end of the antisense strand of the duplex. In certain embodiments, an extended overhang is present on the 5′ end of the antisense strand of the duplex. In certain embodiments, one or more of the nucleotides in the overhang is replaced with a nucleoside thiophosphate. In certain embodiments, the overhang includes a self-complementary portion such that the overhang is capable of forming a hairpin structure that is stable under physiological conditions.

[0429] In certain embodiments, at least one end of at least one strand is extended beyond a duplex targeting region, including structures where one of the strands includes a thermodynamically-stabilizing tetraloop structure (see, e.g., U.S. Pat. Nos. 8,513,207 and 8,927,705, as well as WO2010033225, the entire contents of each of which are incorporated by reference herein). Such structures may include single-stranded extensions (on one or both sides of the molecule)as well as double-stranded extensions.

[0430] In certain embodiments, the 3′ end of the sense strand and the 5′ end of the antisense strand are joined by a polynucleotide sequence comprising ribonucleotides, deoxyribonucleotides or both, optionally wherein the polynucleotide sequence comprises a tetraloop sequence. In certain embodiments, the sense strand is 25-35 nucleotides in length.

[0431] A tetraloop may contain ribonucleotides, deoxyribonucleotides, modified nucleotides, and combinations thereof. Typically, a tetraloop has 4 to 5 nucleotides. In some embodiments, the loop comprises a sequence set forth as GAAA. In some embodiments, at least one of the nucleotide of the loop (GAAA) comprises a nucleotide modification. In some embodiments, the modified nucleotide comprises a 2′-modification. In some embodiments, the 2 ‘-modification is a modification selected from the group consisting of 2’-aminoethyl, 2′-fluoro, 2′-O-methyl, 2′-O-methoxyethyl, 2′-aminodiethoxymethanol, 2′-adem, and 2′-deoxy-2′-fhioro- -d-arabinonucleic acid. In some embodiments, all of the nucleotides of the loop are modified. In some embodiments, the G in the GAAA sequence comprises a 2′-OH. In some embodiments, each of the nucleotides in the GAAA sequence comprises a 2′-O-methyl modification. In some embodiments, each of the A in the GAAA sequence comprises a 2′-OH and the G in the GAAA sequence comprises a 2′-O-methyl modification. In preferred embodiments, In some embodiments, each of the A in the GAAA sequence comprises a 2′-O-methoxyethyl (MOE) modification and the G in the GAAA sequence comprises a 2′-O-methyl modification; or each of the A in the GAAA sequence comprises a 2′-adem modification and the G in the GAAA sequence comprises a 2′-O-methyl modification. See, e.g., PCT Publication No. WO 2020/206350, the entire contents of which are incorporated herein by reference.

[0432] An exemplary 2′ adem modified nucleotide is shown below:

[chemical structure]

[0433] The terms “blunt” or “blunt ended” as used herein in reference to a dsRNA mean that there are no unpaired nucleotides or nucleotide analogs at a given terminal end of a dsRNA, i.e., no nucleotide overhang. One or both ends of a dsRNA can be blunt. Where both ends of a dsRNA are blunt, the dsRNA is said to be blunt ended. To be clear, a “blunt ended” dsRNA is a dsRNA that is blunt at both ends, i.e., no nucleotide overhang at either end of the molecule. Most often such a molecule will be double stranded over its entire length.

[0434] The term “antisense strand” or “guide strand” of an RNAi agent refers to the strand of the RNAi agent, e.g., a dsRNA, which includes a region that is substantially complementary to a target sequence, e.g., a C9orf72 mRNA.

[0435] As used herein, the term “region of complementarity” refers to the region on the antisense strand that is substantially complementary to a sequence, for example a target sequence, e.g., a C9orf72 nucleotide sequence, as defined herein. Where the region of complementarity is not fully complementary to the target sequence, the mismatches can be in the internal or terminal regions of the molecule. Generally, the most tolerated mismatches are in the terminal regions, e.g., within 5, 4, 3, or 2 nucleotides of the 5′- or 3′-terminus of the RNAi agent. In some embodiments, a double stranded RNA agent of the invention includes a nucleotide mismatch in the antisense strand. In some embodiments, the antisense strand of the double stranded RNA agent of the invention includes no more than 4 mismatches with the target mRNA, e.g., the antisense strand includes 4, 3, 2, 1, or 0 mismatches with the target mRNA. In some embodiments, the antisense strand double stranded RNA agent of the invention includes no more than 4 mismatches with the sense strand, e.g., the antisense strand includes 4, 3, 2, 1, or 0 mismatches with the sense strand. In some embodiments, a double stranded RNA agent of the invention includes a nucleotide mismatch in the sense strand. In some embodiments, the sense strand of the double stranded RNA agent of the invention includes no more than 4 mismatches with the antisense strand, e.g., the sense strand includes 4, 3, 2, 1, or 0 mismatches with the antisense strand. In some embodiments, the nucleotide mismatch is, for example, within 5, 4, 3 nucleotides from the 3′-end of the iRNA. In another embodiment, the nucleotide mismatch is, for example, in the 3′-terminal nucleotide of the iRNA agent. In some embodiments, the mismatch(s) is not in the seed region.

[0436] Thus, an RNAi agent as described herein can contain one or more mismatches to the target sequence. In one embodiment, an RNAi agent as described herein contains no more than 3 mismatches (i.e., 3, 2, 1, or 0 mismatches). In one embodiment, an RNAi agent as described herein contains no more than 2 mismatches. In one embodiment, an RNAi agent as described herein contains no more than 1 mismatch. In one embodiment, an RNAi agent as described herein contains 0 mismatches. In certain embodiments, if the antisense strand of the RNAi agent contains mismatches to the target sequence, the mismatch can optionally be restricted to be within the last 5 nucleotides from either the 5′- or 3′-end of the region of complementarity. For example, in such embodiments, for a 23 nucleotide RNAi agent, the strand which is complementary to a region of a C9orf72 gene, generally does not contain any mismatch within the central 13 nucleotides. The methods described herein or methods known in the art can be used to determine whether an RNAi agent containing a mismatch to a target sequence is effective in inhibiting the expression of a C9orf72 gene. Consideration of the efficacy of RNAi agents with mismatches in inhibiting expression of a C9orf72 gene is important, especially if the particular region of complementarity in a C9orf72 gene is known to have polymorphic sequence variation within the population. In some embodiments, the RNAi agent contains a single nucleotide mismatch with the target sequence wherein the mismatch occurs that the 3′ or 5′ terminus of the RNAi agent. The mismatch can be in the antisense strand, the sense strand or both the sense strand and the antisense strand. For an RNAi agent having a 3′ or 5′ terminal mismatch with the target RNA in both the sense strand and the antisense strand, the terminal nucleotides of the sense and antisense strand can for a base pair. Thus, for any of the described antisense or sense sequences disclosed herein, a 5′ or 3′ nucleotide may be substituted for a nucleotide that forms a mismatch with the target RNA.

[0437] As used herein, “substantially all of the nucleotides are modified” are largely but not wholly modified and can include not more than 5, 4, 3, 2, or 1 unmodified nucleotides.

[0438] The term “sense strand” or “passenger strand” of an RNAi agent refers to the strand of the RNAi agent that includes a region that is substantially complementary to a region of the antisense strand as that term is defined herein.

[0439] As used herein, the term “cleavage region” refers to a region that is located immediately adjacent to the cleavage site. The cleavage site is the site on the target at which cleavage occurs. In some embodiments, the cleavage region comprises three bases on either end of, and immediately adjacent to, the cleavage site. In some embodiments, the cleavage region comprises two bases on either end of, and immediately adjacent to, the cleavage site. In some embodiments, the cleavage site specifically occurs at the site bound by nucleotides 10 and 11 of the antisense strand, and the cleavage region comprises nucleotides 11, 12 and 13.

[0440] As used herein, and unless otherwise indicated, the term “complementary.” when used to describe a first nucleotide sequence in relation to a second nucleotide sequence, refers to the ability of an oligonucleotide or polynucleotide comprising the first nucleotide sequence to hybridize and form a duplex structure under certain conditions with an oligonucleotide or polynucleotide comprising the second nucleotide sequence, as will be understood by the skilled person. Such conditions can, for example, be stringent conditions, where stringent conditions can include: 400 mM NaCl, 40 mM PIPES pH 6.4, 1 mM EDTA, 50° ° C. or 70ºC for 12-16 hours followed by washing (see, e.g., “Molecular Cloning: A Laboratory Manual, Sambrook, et al. (1989) Cold Spring Harbor Laboratory Press). Other conditions, such as physiologically relevant conditions as can be encountered inside an organism, can apply. The skilled person will be able to determine the set of conditions most appropriate for a test of complementarity of two sequences in accordance with the ultimate application of the hybridized nucleotides.

[0441] Complementary sequences within an RNAi agent, e.g., within a dsRNA as described herein, include base-pairing of the oligonucleotide or polynucleotide comprising a first nucleotide sequence to an oligonucleotide or polynucleotide comprising a second nucleotide sequence over the entire length of one or both nucleotide sequences. Such sequences can be referred to as “fully complementary” with respect to each other herein. However, where a first sequence is referred to as “substantially complementary” with respect to a second sequence herein, the two sequences can be fully complementary, or they can form one or more, but generally not more than 5, 4, 3 or 2 mismatched base pairs upon hybridization for a duplex up to 30 base pairs, while retaining the ability to hybridize under the conditions most relevant to their ultimate application, e.g., inhibition of gene expression via a RISC pathway. However, where two oligonucleotides are designed to form, upon hybridization, one or more single stranded overhangs, such overhangs shall not be regarded as mismatches with regard to the determination of complementarity. For example, a dsRNA comprising one oligonucleotide 21 nucleotides in length and another oligonucleotide 23 nucleotides in length, wherein the longer oligonucleotide comprises a sequence of 21 nucleotides that is fully complementary to the shorter oligonucleotide, can yet be referred to as “fully complementary” for the purposes described herein.

[0442] “Complementary” sequences, as used herein, can also include, or be formed entirely from, non-Watson-Crick base pairs or base pairs formed from non-natural and modified nucleotides, in so far as the above requirements with respect to their ability to hybridize are fulfilled. Such non-Watson-Crick base pairs include, but are not limited to, G:U Wobble or Hoogstein base pairing.

[0443] The terms “complementary.” “fully complementary” and “substantially complementary” herein can be used with respect to the base matching between the sense strand and the antisense strand of a dsRNA, or between the antisense strand of an RNAi agent and a target sequence, as will be understood from the context of their use.

[0444] As used herein, a polynucleotide that is “substantially complementary to at least part of” an RNA transcript refers to a polynucleotide that is substantially complementary to a contiguous portion of the RNA transcript of interest (e.g., a C9orf72 RNA, either sense strand or antisense strand). For example, a polynucleotide is complementary to at least a part of a C9orf72 RNA if the sequence is substantially complementary to a non-interrupted portion of an RNA.

[0445] Accordingly, in some embodiments, the antisense polynucleotides disclosed herein are fully complementary to the target C9orf72 sequence. In other embodiments, the antisense polynucleotides disclosed herein are substantially complementary to the target C9orf72 sequence and comprise a contiguous nucleotide sequence which is at least 80% complementary over its entire length to the equivalent region of the nucleotide sequence of any one of SEQ ID NOs: 1-4, 9, 11, 13, 15, 17 and 19 such as about 85%, about 90%, about 91%, about 92%, about 93%, about 94%, about 95%, about 96%, about 97%, about 98%, or about 99% complementary.

[0446] As described above, the large GGGGCC (G4C2) hexanucleotide repeat expansion (SEQ ID NO: 100) in the first intron of the C9orf72 gene between exons 1a and 1b and to be pathogenic can be bidirectionally transcribed. Accordingly, in some embodiments, antisense polynucleotides are disclosed herein that are complementary to the either strand of the C9orf72 gene. In other embodiments, the antisense polynucleotides disclosed herein are substantially complementary to the target C9orf72 sequence and comprise a contiguous nucleotide sequence which is at least 80% complementary over its entire length to the equivalent region of the nucleotide sequence of any one of SEQ ID NOs: 5-8, 10, 12, 14, 16, 18 or 20, such as about 85%, about 90%, about 91%, about 92%, about 93%, about 94%, about 95%, about 96%, about 97%, about 98%, or about 99% complementary. In some embodiments, the antisense polynucleotides disclosed herein are substantially complementary to a fragment of a target C9orf72 sequence and comprise a contiguous nucleotide sequence which is at least 80% complementary over its entire length to a fragment of SEQ ID NO:13 selected from the group of nucleotides 27573296-27573318; 27573314-27573336; 27573319-27573341; 27573562-27573584; 27573585-27573607; 27573592-27573614; 27573599-27573621; 27573608-27573630; 27573616-27573638; 27573619-27573641; 27573622-27573644; 27573633-27573655; 27573690-27573712; and 27573717-27573739 of SEQ ID NO:13, such as about 85%, about 90%, about 91%, about 92%, about 93%, about 94%, about 95%, about 96%, about 97%, about 98%, or about 99% complementary.

[0447] In some embodiments, the antisense polynucleotides disclosed herein are substantially complementary to a fragment of a target C9orf72 sequence and comprise a contiguous nucleotide sequence which is at least 80% complementary over its entire length to a fragment of SEQ ID NO:1, such as nucleotides 1-23; 15-37; 33-55; 37-59; 62-84, or 69-91 of SEQ ID NO:1, such as about 85%, about 90%, about 91%, about 92%, about 93%, about 94%, about 95%, about 96%, about 97%, about 98%, or about 99% complementary. Ranges intermediate to the above recited ranges are also contemplated to be part of the disclosure.

[0448] In some embodiments, the antisense polynucleotides disclosed herein are substantially complementary to a fragment of a target C9orf72 sequence and comprise a contiguous nucleotide sequence which is at least 80% complementary over its entire length to a fragment of SEQ ID NO:15, such as nucleotides 5197-5219; 5223-5245; 5226-5248; 5227-5249; 5233-5255; 5248-5270; 5539-5561; 5547-5569; 5917-5939; 5936-5958; 5954-5976; 6008-6030; 6021-6043; 6036-6058; 6043-6065; and 6048-6070 of SEQ ID NO: 15, such as about 85%, about 90%, about 91%, about 92%, about 93%, about 94%, about 95%, about 96%, about 97%, about 98%, or about 99% complementary. Ranges intermediate to the above recited ranges are also contemplated to be part of the disclosure.

[0449] In some embodiments, the antisense polynucleotides disclosed herein are substantially complementary to a fragment of a target C9orf72 sequence and comprise a contiguous nucleotide sequence which is at least 80% complementary over its entire length to a fragment of SEQ ID NO:15, such as nucleotides 5015-5052; 5017-5040; 5032-5059; 5032-5055; 5033-5055; 5035-5059; 5036-5059; 5058-5087; 5059-5087; 5059-5084; 5064-5087; 5197-5222; 5213-5267; 5223-5252; 5229-5252; 5233-5263; 5516-5570; 5539-5565; 5539-5562; 5545-5570; 5545-5569; 5593-5616; 5883-5950; 5917-5950; 5919-5950; 5923-5950; 5934-5977; 5934-5957; 5938-5977; 5938-5965; 5938-5961; 5947-5977; 5947-5973; 5972-6001; 5973-5997; 6006-6029; 6011-6070; 6011-6039; 6011-6038; 6015-6038; 6019-6045; 6019-6042; 6033-6070; 6035-6065; 6035-6059; or 6040-6063 of SEQ ID NO: 15, such as about 85%, about 90%, about 91%, about 92%, about 93%, about 94%, about 95%, about 96%, about 97%, about 98%, or about 99% complementary. Ranges intermediate to the above recited ranges are also contemplated to be part of the disclosure.

[0450] In some embodiments, the antisense polynucleotides disclosed herein are substantially complementary to a fragment of a target C9orf72 sequence and comprise a contiguous nucleotide sequence which is at least 80% complementary over its entire length to a fragment of SEQ ID NO:1, such as nucleotides 15-52; 17-40; 32-59; 32-55; 35-59; 36-59; 58-87; 59-87; 59-84; or 64-87 of SEQ ID NO:1, such as about 85%, about 90%, about 91%, about 92%, about 93%, about 94%, about 95%, about 96%, about 97%, about 98%, or about 99% complementary. Ranges intermediate to the above recited ranges are also contemplated to be part of the disclosure.

[0451] In some embodiments, the antisense polynucleotides disclosed herein are substantially complementary to a fragment of a target C9orf72 sequence and comprise a contiguous nucleotide sequence which is at least 80% complementary over its entire length to a fragment of SEQ ID NO:13, such as nucleotides 27573296-27573584; 27573296-27573575; 27573301-27573338; 27573318-27573342; 27573555-27573583; 27573581-27573607; 27573584-27573607; 27573588-27573671; 27573588-27573666; 27573588-27573624; 27573592-27573624; 27573592-27573617; 27573598-27573624; 27573599-27573623; 27573606-27573655; 27573606-27573652; 27573606-27573647; 27573654-27573712; or 27573707-27573740 of SEQ ID NO: 13, such as about 85%, about 90%, about 91%, about 92%, about 93%, about 94%, about 95%, about 96%, about 97%, about 98%, or about 99% complementary. Ranges intermediate to the above recited ranges are also contemplated to be part of the disclosure.

[0452] In other embodiments, the sense polynucleotides disclosed herein are substantially complementary to the target C9orf72 sequence and comprise a contiguous nucleotide sequence which is at least about 80% complementary over its entire length to any one of the sense strand nucleotide sequences in any one of any one of Tables 2, 3, 10A, 10C, 11, or 12, or a fragment of any one of the sense strand nucleotide sequences in any one of Tables 2, 3, 10A, 10C, 11, or 12 such as about 85%, about 90%, about 91%, about 92%, about 93%, about 94%, about 95%, about 96%, about 97%, about 98%, about 99%, or 100% complementary.

[0453] In other embodiments, the antisense polynucleotides disclosed herein are substantially complementary to the target C9orf72 sequence and comprise a contiguous nucleotide sequence which is at least about 80% complementary over its entire length to any one of the sense strand nucleotide sequences in any one of any one of Tables 5, 6, 10B, or 10D or a fragment of any one of the sense strand nucleotide sequences in any one of Tables 5, 6, 10B, or 10D such as about 85%, about 90%, about 91%, about 92%, about 93%, about 94%, about 95%, about 96%, about 97%, about 98%, about 99%, or 100% complementary.

[0454] In certain embodiments, the sense and antisense strands are selected from any one of duplexes AD-1446213.1; AD-1446217.1; AD-1446222.1; AD-1446234.1; AD-1446243.1; AD-1446246.1; AD-1446252.1; AD-1446259.1; AD-1446265.1; AD-1446268.1; AD-1446271.1; AD-1446279.1; AD-1446289.1; and AD-1446294.1.

[0455] In certain embodiments, the sense and antisense strands are selected from any one of duplexes AD-1446213.1; AD-1446246.1; and AD-1446268.1.

[0456] In certain embodiments, the sense and antisense strands are selected from any one of duplexes AD-1446073.1; AD-1446075.1; AD-1285246.2; AD-1446084.1; AD-1446087.1; AD-1446090.1, and AD-1446095.1.

[0457] In certain embodiments, the sense and antisense strands are selected from any one of duplexes AD-1446087.1 and AD-1446090.1.

[0458] In certain embodiments, the sense and antisense strands are selected from any one of duplexes AD-1285238.1; and AD-1285234.1.

[0459] In certain embodiments, the sense and antisense strands are selected from any one of duplexes AD-1285231.1. AD-1285232.1. AD-1285233.1. AD-1285235.1, AD-1285237.1. AD-1285239.1. AD-1285240.1. AD-1285242.1, AD-1285244.1; AD-1285243.1; AD-1285241.1; AD-1285236.1; AD-1446111.1; AD-1446117.1; AD-1446147.1; AD-1446157.1; AD-1446168.1; AD-1446180.1; AD-1446189.1; AD-1446196.1; AD-1446202.1; AD-1446205.1.

[0460] In certain embodiments, the sense and antisense strands are selected from any one of duplexes AD-1285231.1. AD-1285232.1. AD-1285233.1. AD-1285234.1, AD-1285235.1, AD-1285236.1, AD-1285237.1, AD-1285239.1, AD-1285240.1, AD-1285241.1, AD-1285242.1, and AD-1285243.1.

[0461] In other embodiments, the antisense polynucleotides disclosed herein are substantially complementary to the target C9orf72 sequence and comprise a contiguous nucleotide sequence which is at least about 80% complementary over its entire length to any one of the sense strand nucleotide sequences in any one of any one of Tables 8 or 9, or a fragment of any one of the sense strand nucleotide sequences in any one of Tables 8 or 9, such as about 85%, about 90%, about 91%, about 92%, about 93%, about 94%, about 95%, about 96%, about 97%, about 98%, about 99%, or 100% complementary.

[0462] As used herein, the phrase “inhibiting expression of C9orf72.” includes inhibiting the expression of a mature C9orf72 mRNA, knocking down or inhibiting the expression or reducing the level of a C9orf72 RNA containing a hexanucleotide-repeat in an intron, knocking down or inhibiting the expression or reducing the level of an antisense strand of a C9orf72 RNA containing a hexanucleotide-repeat. Knocking down or inhibiting the expression or reducing the level of a C9orf72 RNA containing a hexanucleotide-repeat includes inhibiting production of sense and antisense C9orf72-containing foci and/or inhibiting production of aberrant dipeptide-repeat (DPR) proteins (e.g., poly(glycine-alanine) or poly(GA) peptides, poly(glycine-proline) or poly(GP) peptides, poly(glycine-arginine) or poly(GR) peptides, poly(alanine-proline) or poly(PA) peptides, or poly(proline-arginine) or poly(PR) peptides). In some embodiments, the repeat-length-dependent formation of RNA foci, the sequestration of specific RNA-binding proteins, or the accumulation or aggregation of poly(glycine-alanine) peptides, poly(glycine-proline) peptides, poly(glycine-arginine) peptides, poly(alanine-proline) peptides, or poly(proline-arginine) peptides is inhibited or decreased by more than 50%, e.g., more than 55%, more than 60%, more than 65%, more than 70%, more than 75%, more than 80%, more than 85%, more than 90%, or more than 95%, and the expression of C9orf72 mature RNA is inhibited by less than 50%, e.g., less than 45%, less than 40%, less than 35%, less than 30%, less than 25%, less than 20%, less than 15%, less than 10% or less than 5%.

[0463] In one embodiment, at least partial suppression of the expression of a C9orf72 gene, is assessed by a reduction of the amount of a C9orf72 RNA, e.g., sense RNA transcript, antisense RNA transcript, total C9orf72 RNA transript, sense C9orf72 repeat-containing RNA transcript, and/or antisense C9orf72 repeat-containing RNA transcript, which can be isolated from or detected in a first cell or group of cells in which a C9orf72 gene is transcribed and which has or have been treated such that the expression of a C9orf72 gene is inhibited, as compared to a second cell or group of cells substantially identical to the first cell or group of cells but which has or have not been so treated (control cells). The degree of inhibition may be expressed in terms of:

$$\frac{( RNA in control cells ) - ( RNA in treated cells )}{RNA in control cells} \times 100 \%$$

[0464] The phrase “contacting a cell with an RNAi agent.” such as a dsRNA, as used herein, includes contacting a cell by any possible means. Contacting a cell with an RNAi agent includes contacting a cell in vitro with the RNAi agent or contacting a cell in vivo with the RNAi agent. The contacting may be done directly or indirectly. Thus, for example, the RNAi agent may be put into physical contact with the cell by the individual performing the method, or alternatively, the RNAi agent may be put into a situation that will permit or cause it to subsequently come into contact with the cell.

[0465] Contacting a cell in vitro may be done, for example, by incubating the cell with the RNAi agent. Contacting a cell in vivo may be done, for example, by injecting the RNAi agent into or near the tissue where the cell is located, or by injecting the RNAi agent into another area, e.g., the central nervous system (CNS), optionally via intrathecal, intravitreal or other injection, or to the bloodstream or the subcutaneous space, such that the agent will subsequently reach the tissue where the cell to be contacted is located. For example, the RNAi agent may contain or be coupled to a ligand, e.g., a lipophilic moiety or moieties as described below and further detailed, e.g., in PCT/US2019/031170, which is incorporated herein by reference, that directs or otherwise stabilizes the RNAi agent at a site of interest, e.g., the CNS. Combinations of in vitro and in vivo methods of contacting are also possible. For example, a cell may also be contacted in vitro with an RNAi agent and subsequently transplanted into a subject.

[0466] In one embodiment, contacting a cell with an RNAi agent includes “introducing” or “delivering the RNAi agent into the cell” by facilitating or effecting uptake or absorption into the cell. Absorption or uptake of an RNAi agent can occur through unaided diffusive or active cellular processes, or by auxiliary agents or devices. Introducing an RNAi agent into a cell may be in vitro or in vivo. For example, for in vivo introduction, an RNAi agent can be injected into a tissue site or administered systemically. In vitro introduction into a cell includes methods known in the art such as electroporation and lipofection. Further approaches are described herein below or are known in the art.

[0467] The term “lipophile” or “lipophilic moiety” broadly refers to any compound or chemical moiety having an affinity for lipids. One way to characterize the lipophilicity of the lipophilic moiety is by the octanol-water partition coefficient, logKow, where Kow is the ratio of a chemical's concentration in the octanol-phase to its concentration in the aqueous phase of a two-phase system at equilibrium. The octanol-water partition coefficient is a laboratory-measured property of a substance. However, it may also be predicted by using coefficients attributed to the structural components of a chemical which are calculated using first-principle or empirical methods (see, for example, Tetko et al., J. Chem. Inf. Comput. Sci. 41:1407-21 (2001), which is incorporated herein by reference in its entirety). It provides a thermodynamic measure of the tendency of the substance to prefer a non-aqueous or oily milieu rather than water (i.e. its hydrophilic/lipophilic balance). In principle, a chemical substance is lipophilic in character when its logKow exceeds 0. Typically, the lipophilic moiety possesses a logKow exceeding 1, exceeding 1.5, exceeding 2, exceeding 3, exceeding 4, exceeding 5, or exceeding 10. For instance, the logKow of 6-amino hexanol, for instance, is predicted to be approximately 0.7. Using the same method, the logKow of cholesteryl N-(hexan-6-ol) carbamate is predicted to be 10.7.

[0468] The lipophilicity of a molecule can change with respect to the functional group it carries. For instance, adding a hydroxyl group or amine group to the end of a lipophilic moiety can increase or decrease the partition coefficient (e.g., logKow) value of the lipophilic moiety.

[0469] Alternatively, the hydrophobicity of the double-stranded RNAi agent, conjugated to one or more lipophilic moieties, can be measured by its protein binding characteristics. For instance, in certain embodiments, the unbound fraction in the plasma protein binding assay of the double-stranded RNAi agent could be determined to positively correlate to the relative hydrophobicity of the double-stranded RNAi agent, which could then positively correlate to the silencing activity of the double-stranded RNAi agent.

[0470] In one embodiment, the plasma protein binding assay determined is an electrophoretic mobility shift assay (EMSA) using human serum albumin protein. An exemplary protocol of this binding assay is illustrated in detail in, e.g., PCT/US2019/031170. The hydrophobicity of the double-stranded RNAi agent, measured by fraction of unbound siRNA in the binding assay, exceeds 0.15, exceeds 0.2, exceeds 0.25, exceeds 0.3, exceeds 0.35, exceeds 0.4, exceeds 0.45, or exceeds 0.5 for an enhanced in vivo delivery of siRNA.

[0471] Accordingly, conjugating the lipophilic moieties to the internal position(s) of the double-stranded RNAi agent provides optimal hydrophobicity for the enhanced in vivo delivery of siRNA. In some embodiments, the lipophilic moiety facilitates or improves delivery of the RNAi agent to a neuronal cell, or a cell in a neuronal tissue, or a cell in a central nervous system tissue.

[0472] The term “lipid nanoparticle” or “LNP” is a vesicle comprising a lipid layer encapsulating a pharmaceutically active molecule, such as a nucleic acid molecule, e.g., an RNAi agent or a plasmid from which an RNAi agent is transcribed. LNPs are described in, for example, U.S. Pat. Nos. 6,858,225, 6,815,432, 8,158,601, and 8,058,069, the entire contents of which are hereby incorporated herein by reference.

[0473] As used herein, a “subject” is an animal, such as a mammal, including a primate (such as a human, a non-human primate, e.g., a monkey, and a chimpanzee), or a non-primate (such as a rat, or a mouse). In a preferred embodiment, the subject is a human, such as a human being treated or assessed for a disease, disorder, or condition that would benefit from reduction in levels of target C9orf72 RNA; a human at risk for a disease, disorder, or condition that would benefit from reduction in levels of target C9orf72 RNA; a human having a disease, disorder, or condition that would benefit from reduction in C9orf72 expression; or human being treated for a disease, disorder, or condition that would benefit from reduction in C9orf72 expression as described herein. In some embodiments, the subject is a female human. In other embodiments, the subject is a male human. In one embodiment, the subject is an adult subject. In one embodiment, the subject is a pediatric subject. In another embodiment, the subject is a juvenile subject, i.e., a subject below 20 years of age.

[0474] As used herein, the terms “treating” or “treatment” refer to a beneficial or desired result including, but not limited to, alleviation or amelioration of one or more signs or symptoms associated with expression of a C9orf72 hexanucleotide repeat expansion transcript or a dipeptide repeat product thereof, e.g., C9orf72-associated diseases, such as C9orf72-associated disease. “Treatment” can also mean prolonging survival as compared to expected survival in the absence of treatment.

[0475] The term “lower” in the context of the level of C9orf72 in a subject or a disease marker or symptom refers to a statistically significant decrease in such level. The decrease can be, for example, at least 10%, 15%, 20%, 25%, 30%, %, 40%, 45%, 50%, 55%, 60%, 65%, 70%, 75%, 80%, 85%, 90%, 95%, or more. In certain embodiments, a decrease is at least 20%. In certain embodiments, the decrease is at least 50% in a disease marker, e.g., the level of sense- or antisense-containing foci and/or the level of aberrant dipeptide repeat protein, e.g., a decrease of 50%, 55%, 60%, 65%, 70%, 75%, 80%, 85%, 90%, 95%, or more. In some embodiments, a decrease is no more than 50% for C9orf72 protein and/or C9orf72 mRNA level, e.g., no more than 50%, 45%, 40%, 35%, 30%, 25%. 20%, 15%, 10%, or 5%. “Lower” in the context of the level of C9orf72 in a subject is preferably down to a level accepted as within the range of normal for an individual without such disorder. In certain embodiments, “lower” is the decrease in the difference between the level of a marker or symptom for a subject suffering from a disease and a level accepted within the range of normal for an individual, e.g., the level of decrease in bodyweight between an obese individual and an individual having a weight accepted within the range of normal.

[0476] As used herein, “prevention” or “preventing.” when used in reference to a disease, disorder, or condition thereof, that would benefit from a reduction in expression of a C9orf72 hexanucleotide repeat expansion transcript or a dipeptide product thereof, refers to a reduction in the likelihood that a subject will develop a symptom associated with such a disease, disorder, or condition, e.g., a symptom of a C9orf72-associated disease. The failure to develop a disease, disorder, or condition, or the reduction in the development of a symptom associated with such a disease, disorder, or condition (e.g., by at least about 10% on a clinically accepted scale for that disease or disorder), or the exhibition of delayed symptoms delayed (e.g., by days, weeks, months or years) is considered effective prevention.

[0477] As used herein, the term “C9orf72-associated disease” or “C9orf72-associated disorder” includes any disease or disorder that would benefit from reduction in the expression and/or activity of C9orf72 hexanucleotide repeat expansion transcript. Exemplary C9orf72-associated diseases include those diseases in which subjects carry a hexanucleotide repeat (GGGGCC (SEQ ID NO: 100)) expansion in the intron between exons 1a and 1b in the C9orf72 gene, e.g., amyotrophic lateral sclerosis, frontotemporal dementia, Huntington's disease, e.g., Huntington-Like Syndrome Due To C9orf72 Expansions, parkinsonism, olivopontocerebellar degeneration, corticobasal syndrome, or Alzheimer's disease.

[0478] Normal G4C2 repeats are ˜25 units or less, and high penetrance disease alleles are typically greater than ˜60 repeat units, ranging up to more than 4,000 units; rarely, repeats between 47 and 60 segregate with disease in families. A repeat-primed PCR assay is typically used to detect smaller expansions (<80), but accurately sizing larger repeats requires other techniques (e.g. Southern blot hybridization) that provides an estimate of length.

[0479] Subjects having a GGGGCC (or G4C2) hexanucleotide expansion (SEQ ID NO: 100) in an intron of the C9orf72 gene can present as amyotrophic lateral sclerosis (ALS) or frontotemporal dementia (FTD) even in the same family and, therefore, the neurodegeneration associated with this expansion is referred to herein as “C9orf72 Amyotrophic lateral sclerosis/frontotemporal dementia” or C9orf72 ALS/FTD.” It is an autosomal dominant disease and is the most common form of familial ALS, accounting for about a third of ALS families and 5-10% of sporadic cases in an ALS clinic. It is also a common cause of FTD, explaining about one fourth of familial FTD. Age of symptom onset ranges from 30 to 70 years of age with a mean onset in the late 50s. C9orf72-mediated ALS most often resembles typical ALS, can be bulbar or limb onset, can progress rapidly (though not always) and can be associated with later cognitive symptoms. Thus, C9orf72-mediated ALS is evaluated and treated just as in any ALS patient. The pattern of C9orf72-mediated FTD most commonly is behavioral variant FTD, with the full range of behavioral and cognitive symptoms including disinhibition, apathy and executive dysfunction. Less commonly, C9orf72-mediated FTD presents semantic variant primary progressive aphasia (PPA) or nonfluent variant PPA, and, very rarely, can resemble corticobasal syndrome, progressive supranuclear palsy or an HD-like syndrome. Occasionally parkinsonian features are seen in C9orf72-mediated ALS or FTD.

[0480] Subjects may exhibit frontotemporal lobar degeneration (FTLD) characterized by progressive changes in behavior, executive dysfunction, and/or language impairment. Of the three FTLD clinical syndromes, behavioral variant FTD (bvFTD) is most often, but not exclusively, present. It is characterized by progressive behavioral impairment and a decline in executive function with predominant frontal lobe atrophy on brain MRI. Motor neuron disease, including upper or lower motor neuron dysfunction (or both) that may or may not fulfill criteria for the full ALS phenotype may also be present. Some degree of parkinsonism, which is present in many individuals with C9orf72-associated bvFTD, is typically of the akinetic-rigid type without tremor, and is levodopa unresponsive.

[0481] Huntington's disease-like syndromes (HD-like syndromes, or HDL syndromes) are a family of inherited neurodegenerative diseases that closely resemble Huntington's disease (HD) in that they typically produce a combination of chorea, cognitive decline or dementia and behavioral or psychiatric problems.

[0482] Subjects having Huntington disease-like syndrome due to C9orf72 expansions are characterized as having movement disorders, including dystonia, chorea, myoclonus, tremor and rigidity. Associated features are also cognitive and memory impairment, early psychiatric disturbances and behavioral problems. The mean age at onset is about 43 years (range 8-60). Early psychiatric and behavioral problems (including depression, apathy, obsessive behavior, and psychosis) are common. Cognitive symptoms present as executive dysfunction. Movement disorders are prominent: Parkinsonian features and pyramidal features may also be present. “Therapeutically effective amount,” as used herein, is intended to include the amount of an RNAi agent that, when administered to a subject having a C9orf72-associated disease, is sufficient to effect treatment of the disease (e.g., by diminishing, ameliorating, or maintaining the existing disease or one or more symptoms of disease). The “therapeutically effective amount” may vary depending on the RNAi agent, how the agent is administered, the disease and its severity and the history, age, weight, family history, genetic makeup, the types of preceding or concomitant treatments, if any, and other individual characteristics of the subject to be treated.

[0483] “Prophylactically effective amount.” as used herein, is intended to include the amount of an RNAi agent that, when administered to a subject having a C9orf72-associated disorder, is sufficient to prevent or ameliorate the disease or one or more symptoms of the disease. Ameliorating the disease includes slowing the course of the disease or reducing the severity of later-developing disease. The “prophylactically effective amount” may vary depending on the RNAi agent, how the agent is administered, the degree of risk of disease, and the history, age, weight, family history, genetic makeup, the types of preceding or concomitant treatments, if any, and other individual characteristics of the patient to be treated.

[0484] A “therapeutically-effective amount” or “prophylactically effective amount” also includes an amount of an RNAi agent that produces some desired local or systemic effect at a reasonable benefit/risk ratio applicable to any treatment. An RNAi agent employed in the methods of the present disclosure may be administered in a sufficient amount to produce a reasonable benefit/risk ratio applicable to such treatment.

[0485] The phrase “pharmaceutically acceptable” is employed herein to refer to those compounds, materials (including salts), compositions, or dosage forms which are, within the scope of sound medical judgment, suitable for use in contact with the tissues of human subjects and animal subjects without excessive toxicity, irritation, allergic response, or other problem or complication, commensurate with a reasonable benefit/risk ratio.

[0486] The phrase “pharmaceutically-acceptable carrier” as used herein means a pharmaceutically-acceptable material, composition or vehicle, such as a liquid or solid filler, diluent, excipient, manufacturing aid (e.g., lubricant, talc magnesium, calcium or zinc stearate, or steric acid), or solvent encapsulating material, involved in carrying or transporting the subject compound from one organ, or portion of the body, to another organ, or portion of the body. Each carrier must be “acceptable” in the sense of being compatible with the other ingredients of the formulation and not injurious to the subject being treated. Some examples of materials which can serve as pharmaceutically-acceptable carriers include: (1) sugars, such as lactose, glucose and sucrose; (2) starches, such as corn starch and potato starch; (3) cellulose, and its derivatives, such as sodium carboxymethyl cellulose, ethyl cellulose and cellulose acetate; (4) powdered tragacanth; (5) malt; (6) gelatin; (7) lubricating agents, such as magnesium state, sodium lauryl sulfate and talc; (8) excipients, such as cocoa butter and suppository waxes; (9) oils, such as peanut oil, cottonseed oil, safflower oil, sesame oil, olive oil, corn oil and soybean oil; (10) glycols, such as propylene glycol; (11) polyols, such as glycerin, sorbitol, mannitol and polyethylene glycol; (12) esters, such as ethyl oleate and ethyl laurate; (13) agar; (14) buffering agents, such as magnesium hydroxide and aluminum hydroxide; (15) alginic acid; (16) pyrogen-free water; (17) isotonic saline; (18) Ringer's solution; (19) ethyl alcohol; (20) pH buffered solutions; (21) polyesters, polycarbonates or polyanhydrides; (22) bulking agents, such as polypeptides and amino acids (23) serum component, such as serum albumin, HDL and LDL; and (22) other non-toxic compatible substances employed in pharmaceutical formulations.

[0487] The term “sample.” as used herein, includes a collection of similar fluids, cells, or tissues isolated from a subject, as well as fluids, cells, or tissues present within a subject. Examples of biological fluids include blood, serum and serosal fluids, plasma, cerebrospinal fluid, ocular fluids, lymph, urine, saliva, and the like. Tissue samples may include samples from tissues, organs or localized regions. For example, samples may be derived from particular organs, parts of organs, or fluids or cells within those organs. In certain embodiments, samples may be derived from the brain (e.g., whole brain or certain segments of brain, e.g., striatum, or certain types of cells in the brain, such as, e.g., neurons and glial cells (astrocytes, oligodendrocytes, microglial cells)). In some embodiments, a “sample derived from a subject” refers to blood drawn from the subject or plasma or serum derived therefrom. In further embodiments, a “sample derived from a subject” refers to brain tissue (or subcomponents thereof) or retinal tissue (or subcomponents thereof) derived from the subject

### II. RNAi Agents of the Disclosure

[0488] As described elsewhere herein, mutations in C9orf72 have been linked to familial frontotemporal dementia (FTD) and amyotrophic lateral sclerosis (ALS). The mutations are the result of expansion of G4C2 (SEQ ID NO: 100) hexanucleotide repeats located within the intron between exon 1A and exon 1B of the C9orf72 gene. The hexanucleotide repeats may be translated through a non-AUG-initiated mechanism. Accumulation of the repeat expansion-containing RNA (target RNA) or translation of the repeat sequences may cause or contribute to FTD and/or ALS or disease symptoms associated with FTD and/or ALS.

[0489] Accordingly, the present invention provides dsRNA agents that selectively and efficiently decrease expression of C9orf72-related expression products, RNA and/or translated polypeptides, associated with the hexanucleotide repeat expansions. In some embodiments, the dsRNA agents target (e.g., selectively target) the hexanucleotide-repeat-containing RNA (target RNA) and knock down the target RNA and polypeptides expressed from the hexanucleotide-repeat-containing RNA. The dsRNA agents may be used in methods for therapeutic treatment and/or prevention of signs or symptoms associated with FTD and/or ALS, including, but not limited to, repeat-length-dependent formation of RNA foci, sequestration of specific RNA-binding proteins, and accumulation and aggregation of dipeptide repeat proteins (e.g., poly(glycine-alanine), poly(glycine-proline), poly(glycine-arginine), poly(alanine-proline), and poly(proline-arginine)) resulting from repeat-associated non-AUG (AUG) translation in neurons. The dsRNA agents may be used in methods for therapeutic treatment and/or prevention of signs or symptoms associated with FTD and/or ALS, including, but not limited to, signs and symptoms of motor neuron disease and signs and symptoms of dementia. Signs and symptoms of motor neuron disease can include, for example, tripping, dropping things, abnormal fatigue of the arms and/or legs, slurred speech, muscle cramps and twitches, uncontrollable periods of laughing or crying, and trouble breathing. Signs and symptoms of dementia can include, for example, behavioral changes, personality changes, speech and language problems, and movement-related problems. Such methods comprise administration of one or more dsRNA agents as described herein to a subject (e.g., a human or animal subject).

[0490] The dsRNA agents described herein may stop or reduce the accumulation of repeat-containing C9orf72 RNA (e.g., assayed as RNA foci) and thereby prevent the synthesis of dipeptide repeat proteins by RAN translation.

[0491] In some embodiments, the dsRNA agents of the invention target mature C9orf72 mRNAs (i.e., mRNAs in which introns have been spliced out). In other embodiments, the dsRNA agents of the invention target C9orf72 RNAs containing an intron, such as intron 1A (i.e., sense or antisense RNAs in which introns have not been spliced out, RNA regions spliced out of a precursor mRNA, or alternatively spliced RNAs).

[0492] A dsRNA includes two RNA strands that are complementary and hybridize to form a duplex structure under conditions in which the dsRNA will be used. In some embodiments, one strand of a dsRNA (the antisense strand) includes a region of complementarity that is substantially complementary, and generally fully complementary, to a target sequence. The target sequence can be derived from the sequence of an RNA formed during the expression of a C9orf72 gene. The other strand (the sense strand) includes a region that is complementary to the antisense strand, such that the two strands hybridize and form a duplex structure when combined under suitable conditions. In some embodiments, one strand of a dsRNA (the sense strand) includes a region of complementarity that is substantially complementary, and generally fully complementary, to a target sequence derived from the antisense sequence of an RNA formed during the expression of a C9orf72 gene. The other strand (the antisense strand) includes a region that is complementary to the sense strand, such that the two strands hybridize and form a duplex structure when combined under suitable conditions. As described elsewhere herein and as known in the art, the complementary sequences of a dsRNA can also be contained as self-complementary regions of a single nucleic acid molecule, as opposed to being on separate oligonucleotides.

[0493] Generally, the duplex structure is 15 to 30 base pairs in length, e.g., 15-29, 15-28, 15-27, 15-26, 15-25, 15-24, 15-23, 15-22, 15-21, 15-20, 15-19, 15-18, 15-17, 18-30, 18-29, 18-28, 18-27, 18-26, 18-25, 18-24, 18-23, 18-22, 18-21, 18-20, 19-30, 19-29, 19-28, 19-27, 19-26, 19-25, 19-24, 19-23, 19-22, 19-21, 19-20, 20-30, 20-29, 20-28, 20-27, 20-26, 20-25, 20-24,20-23, 20-22, 20-21, 21-30, 21-29, 21-28, 21-27, 21-26, 21-25, 21-24, 21-23, or 21-22 base pairs in length. In certain preferred embodiments, the duplex structure is 18 to 25 base pairs in length, e.g., 18-25, 18-24, 18-23, 18-22, 18-21, 18-20, 19-25, 19-24, 19-23, 19-22, 19-21, 19-20, 20-25, 20-24,20-23, 20-22, 20-21, 21-25, 21-24, 21-23, 21-22, 22-25, 22-24, 22-23, 23-25, 23-24 or 24-25 base pairs in length, for example, 19-21 base pairs in length. Ranges and lengths intermediate to the above recited ranges and lengths are also contemplated to be part of the disclosure.

[0494] Similarly, the region of complementarity to the target sequence is 15 to 30 nucleotides in length, e.g., 15-29, 15-28, 15-27, 15-26, 15-25, 15-24, 15-23, 15-22, 15-21, 15-20, 15-19, 15-18, 15-17, 18-30, 18-29, 18-28, 18-27, 18-26, 18-25, 18-24, 18-23, 18-22, 18-21, 18-20, 19-30, 19-29, 19-28, 19-27, 19-26, 19-25, 19-24, 19-23, 19-22, 19-21, 19-20, 20-30, 20-29, 20-28, 20-27, 20-26, 20-25, 20-24,20-23, 20-22, 20-21, 21-30, 21-29, 21-28, 21-27, 21-26, 21-25, 21-24, 21-23, or 21-22 nucleotides in length, for example 19-23 nucleotides in length or 21-23 nucleotides in length. Ranges and lengths intermediate to the above recited ranges and lengths are also contemplated to be part of the disclosure.

[0495] In some embodiments, the duplex structure is 19 to 30 base pairs in length. Similarly, the region of complementarity to the target sequence is 19 to 30 nucleotides in length.

[0496] In some embodiments, the dsRNA is 15 to 23 nucleotides in length, 19 to 23 nucleotides in length, or 25 to 30 nucleotides in length. In general, the dsRNA is long enough to serve as a substrate for the Dicer enzyme. For example, it is well known in the art that dsRNAs longer than about 21-23 nucleotides can serve as substrates for Dicer. As the ordinarily skilled person will also recognize, the region of an RNA targeted for cleavage will most often be part of a larger RNA molecule, often an mRNA molecule. Where relevant, a “part” of an mRNA target is a contiguous sequence of an mRNA target of sufficient length to allow it to be a substrate for RNAi-directed cleavage (i.e., cleavage through a RISC pathway).

[0497] One of skill in the art will also recognize that the duplex region is a primary functional portion of a dsRNA, e.g., a duplex region of about 15 to 36 base pairs, e.g., 15-36, 15-35, 15-34, 15-33, 15-32, 15-31, 15-30, 15-29, 15-28, 15-27, 15-26, 15-25, 15-24, 15-23, 15-22, 15-21, 15-20, 15-19, 15-18, 15-17, 18-30, 18-29, 18-28, 18-27, 18-26, 18-25, 18-24, 18-23, 18-22, 18-21, 18-20, 19-30, 19-29, 19-28, 19-27, 19-26, 19-25, 19-24, 19-23, 19-22, 19-21, 19-20, 20-30, 20-29, 20-28, 20-27, 20-26, 20-25, 20-24,20-23, 20-22, 20-21, 21-30, 21-29, 21-28, 21-27, 21-26, 21-25, 21-24, 21-23, or 21-22 base pairs, for example, 19-21 base pairs. Thus, in one embodiment, to the extent that it becomes processed to a functional duplex, of e.g., 15-30 base pairs, that targets a desired RNA for cleavage, an RNA molecule or complex of RNA molecules having a duplex region greater than 30 base pairs is a dsRNA. Thus, an ordinarily skilled artisan will recognize that in one embodiment, a miRNA is a dsRNA. In another embodiment, a dsRNA is not a naturally occurring miRNA. In another embodiment, an RNAi agent useful to target C9orf72 expression is not generated in the target cell by cleavage of a larger dsRNA.

[0498] A dsRNA as described herein can further include one or more single-stranded nucleotide overhangs e.g., 1, 2, 3, or 4 nucleotides. A nucleotide overhang can comprise or consist of a nucleotide/nucleoside analog, including a deoxynucleotide/nucleoside. The overhang(s) can be on the sense strand, the antisense strand or any combination thereof. Furthermore, the nucleotide(s) of an overhang can be present on the 5′-end, 3′-end or both ends of either an antisense or sense strand of a dsRNA.

[0499] A dsRNA can be synthesized by standard methods known in the art. Double stranded RNAi compounds of the invention may be prepared using a two-step procedure. First, the individual strands of the double stranded RNA molecule are prepared separately. Then, the component strands are annealed. The individual strands of the siRNA compound can be prepared using solution-phase or solid-phase organic synthesis or both. Organic synthesis offers the advantage that the oligonucleotide strands comprising unnatural or modified nucleotides can be easily prepared. Similarly, single-stranded oligonucleotides of the invention can be prepared using solution-phase or solid-phase organic synthesis or both.

[0500] Regardless of the method of synthesis, the siRNA preparation can be prepared in a solution (e.g., an aqueous or organic solution) that is appropriate for formulation. For example, the siRNA preparation can be precipitated and redissolved in pure double-distilled water, and lyophilized. The dried siRNA can then be resuspended in a solution appropriate for the intended formulation process.

[0501] In certain embodiments, the dsRNA agents of the invention target a C9orf72 target RNA comprising a hexanucleotide repeat comprising multiple contiguous copies, for example, a C9orf72 target RNA with a pathogenic hexanucleotide repeat expansion (having, for example, at least about 30, at least about 35, at least about 40, at least about 50, at least about 60, at least about 70, at least about 80, at least about 100, at least about 200, at least about 300, at least about 400, or at least about 500 copies of the hexanucleotide repeat).

[0502] In one aspect, a dsRNA of the disclosure includes at least two nucleotide sequences, a sense sequence and an antisense sequence. The sense strand sequence for C9orf72 may be selected from the group of sequences provided in any one of Tables 2, 3, 5, 6, 8, 9, 10A, 10B, 10C, 10D, 11, and 12 and the corresponding nucleotide sequence of the antisense strand of the sense strand may be selected from the group of sequences of any one of Tables 2, 3, 5, 6, 8, 9, 10A, 10B, 10C, 10D, 11, and 12. In this aspect, one of the two sequences is complementary to the other of the two sequences, with one of the sequences being substantially complementary to a sequence of an RNA generated in the expression of a C9orf72 gene locus. As such, in this aspect, a dsRNA will include two oligonucleotides, where one oligonucleotide is described as the sense strand (passenger strand) in any one of Tables 2, 3, 5, 6, 8, 9, 10A, 10B, 10C, 10D, 11, and 12 and the second oligonucleotide is described as the corresponding antisense strand (guide strand) of the sense strand in any one of Tables 2, 3, 5, 6, 8, 9, 10A, 10B, 10C, 10D, 11, and 12.

[0503] In one embodiment, the substantially complementary sequences of the dsRNA are contained on separate oligonucleotides. In another embodiment, the substantially complementary sequences of the dsRNA are contained on a single oligonucleotide.

[0504] It will be understood that, although the sequences in Tables 2 and 5 are described as modified or conjugated sequences, the RNA of the RNAi agent of the disclosure e.g., a dsRNA of the disclosure, may comprise any one of the sequences set forth in any one of Tables 2, 3, 5, 6, 8, 9, 10A, 10B, 10C, 10D, 11, and 12 that is un-modified, un-conjugated, or modified or conjugated differently than described therein.

[0505] The skilled person is well aware that dsRNAs having a duplex structure of about 20 to 23 base pairs, e.g., 21, base pairs have been hailed as particularly effective in inducing RNA interference (Elbashir et al., (2001) EMBO J., 20:6877-6888). However, others have found that shorter or longer RNA duplex structures can also be effective (Chu and Rana (2007) RNA 14:1714-1719; Kim et al. (2005) Nat Biotech 23:222-226). In the embodiments described above, by virtue of the nature of the oligonucleotide sequences provided herein, dsRNAs described herein can include at least one strand of a length of minimally 21 nucleotides. It can be reasonably expected that shorter duplexes minus only a few nucleotides on one or both ends can be similarly effective as compared to the dsRNAs described above. Hence, dsRNAs having a sequence of at least 15, 16, 17, 18, 19, 20, or more contiguous nucleotides derived from one of the sequences provided herein, and differing in their ability to inhibit the expression of a C9orf72 gene by not more than 10, 15, 20, 25, or 30% inhibition from a dsRNA comprising the full sequence using the in vitro assay with, e.g., Bc(2)c cells and a 10 nM concentration of the RNA agent and the PCR assay as provided in the examples herein, are contemplated to be within the scope of the present disclosure.

[0506] In addition, the RNAs described herein identify a site(s) in a C9orf72 transcript that is susceptible to RISC-mediated cleavage. As such, the present disclosure further features RNAi agents that target within this site(s). As used herein, an RNAi agent is said to target within a particular site of an RNA transcript if the RNAi agent promotes cleavage of the transcript anywhere within that particular site. Such an RNAi agent will generally include at least about 15 contiguous nucleotides, preferably at least 19 nucleotides, from one of the sequences provided herein coupled to additional nucleotide sequences taken from the region contiguous to the selected sequence in a C9orf72 gene.

[0507] The dsRNA agents disclosed herein inhibit expression of the C9orf72 target RNA comprising the hexanucleotide repeat. Inhibiting expression includes any level of inhibition (e.g., partial inhibition of expression). For example, the dsRNA agents may inhibit expression of the C9orf72 target RNA comprising the hexanucleotide repeat by at least about 10%, at least about 20%, at least about 30%, at least about 40%, at least about 50%, at least about 60%, at least about 70%, at least about 80%, or at least about 90% (or to a point where the C9orf72 target RNA is undetectable). For example, these levels of inhibition can be within 24-48 hours after administration to a cell expressing the C9orf72 target RNA comprising the hexanucleotide repeat. The decrease can be, for example, relative to the cell before treatment with dsRNA agent or relative to a control cell that was not treated with the dsRNA agent.

[0508] The dsRNA agents disclosed herein may also, for example, selectively reduce the level of or inhibit expression of the C9orf72 target RNA comprising the intronic hexanucleotide repeat relative to expression of a mature C9orf72 messenger RNA. A mature C9orf72 messenger RNA in this context is a C9orf72 RNA transcript that has been spliced and processed. A mature C9orf72 messenger RNA consists exclusively of exons and has all introns removed. A dsRNA agent may selectively inhibit expression of the C9orf72 target RNA comprising the intronic hexanucleotide repeat relative to expression of a mature C9orf72 messenger RNA if the relative decrease in expression of the C9orf72 target RNA is greater than the relative decrease in expression of a mature C9orf72 messenger RNA after administration of the dsRNA agent to a cell expressing the C9orf72 target RNA. For example, dsRNA agents may inhibit expression of the mature C9orf72 messenger RNA by less than about 50%, less than about 40%, less than about 30%, less than about 20%, less than about 10%, or less than about 5% (or, for example, does not have any statistically significant or functionally significant effect on expression). For example, these levels of inhibition can be within 24-48 hours after administration to a cell expressing the mature C9orf72 messenger RNA.

[0509] The dsRNA agents disclosed herein can also, for example, reduce dipeptide repeat protein synthesis or dipeptide repeat protein levels in a cell (e.g., within 24-48 hours after administration to the cell). For example, the dsRNA agent may reduce dipeptide repeat protein synthesis or dipeptide repeat protein levels by at least about 10%, at least about 20%, at least about 30%, at least about 40%, at least about 50%, at least about 60%, at least about 70%, at least about 80%, or at least about 90%. The decrease can be, for example, relative to the cell before treatment with dsRNA agent or relative to a control cell that was not treated with the dsRNA agent.

[0510] According to certain aspects of the invention, an iRNA agent may be designed to target a hotspot region of any of the target RNAs described herein, including any identified portions of a target RNA (e.g., a particular exon). As used herein, a hotspot region may refer to an approximately 19-200, 19-150, 19-100, 19-75, 19-50, 21-200, 21-150, 21-100, 21-75, 21-50, 50-200, 50-150, 50-100, 50-75, 75-200, 75-150, 75-100, 100-200, or 100-150 nucleotide region of a target RNA sequence for which targeting using RNAi agents provides an observably higher probability of efficacious silencing relative to targeting other regions of the same target RNA. According to certain aspects of the invention, a hotspot region may comprise a limited region of the target RNA, and in some cases, a substantially limited region of the target, including for example, less than half of the length of the target RNA, such as about 5%, 10%, 15%, 20%, 25%, or 30% of the length of the target RNA. Conversely, the other regions against which a hotspot is compared may cumulatively comprise at least a majority of the length of the target RNA. For example, the other regions may cumulatively comprise at least about 60%, or at least about 70%, or at least about 80%, or at least about 90%, or at least about 95% of the length of the target RNA.

[0511] Compared regions of the target RNA may be empirically evaluated for identification of hotspots using efficacy data obtained from in vitro or in vivo screening assays. For example, RNAi agents targeting various regions that span a target RNA may be compared for frequency of efficacious iRNA agents (e.g., the amount by which target gene expression is inhibited, such as measured by mRNA expression or protein expression) that bind each region. In general, a hotspot can be recognized by observing clustering of multiple efficacious RNAi agents that bind to a limited region of the RNA target. A hotspot may be sufficiently characterized as such by observing efficacy of iRNA agents which cumulatively span at least about 60% of the target region identified as a hotspot, such as about 70%, about 80%, about 90%, or about 95% or more of the length of the region, including both ends of the region (i.e. at least about 60%, 70%, 80%, 90%, or 95% or more of the nucleotides within the region, including the nucleotides at each end of the region, were targeted by an iRNA agent). According to some aspects of the invention, an iRNA agent which demonstrates at least about 50%, 55%, 60%, 65%, 70%, 75%, 80%, 85%, 90%, or 95% inhibition over the region (e.g., no more than about 50%, 45%, 40%, 35%, 30%, 25%, 20%, 15%, 10%, or 5% mRNA remaining) may be identified as efficacious.

[0512] Amenibility to targeting of RNA regions may also be assessed using quantitative comparison of inhibition measurements across different regions of a defined size (e.g. 25, 30, 40, 50, 60, 70, 80, 90, or 100, 110, 120, 130, 140, 150, 160, 170, 180, 190, or 200 nts). For example, an average level of inhibition may be determined for each region and the averages of each region may be compared. The average level of inhibition within a hotspot region may be substantially higher than the average of averages for all evaluated regions. According to some aspects, the average level of inhibition in a hotspot region may be at least about 10%, 20%, 30%, 40%, or 50% higher than the average of averages. According to some aspects, the average level of inhibition in a hotspot region may be at least about 1.0, 1.1, 1.2, 1.3, 1.4, 1.5 1.6, 1.7, 1.8, 1.9, or 2.0 standard deviations above the average of averages. The average level of inhibition may be higher by a statistically significant (e.g., p<0.05) amount. According to some aspects, each inhibition measurement within a hotspot region may be above a threshold amount (e.g., at or below a threshold amount of mRNA remaining). According to some aspects, each inhibition measurement within the region may be substantially higher than an average of all inhibition measurements across all the measured regions. For example, each inhibition measurement in a hotspot region may be at least about 10%, 20%, 30%, 40%, or 50% higher than the average of all inhibition measurements. According to some aspects, each inhibition measurement may be at least about 1.0, 1.1, 1.2, 1.3, 1.4, 1.5 1.6, 1.7, 1.8, 1.9, or 2.0 standard deviations above the average of all inhibition measurements. Each inhibition measurement may be higher by a statistically significant (e.g., p<0.05) amount than the average of all inhibition measurements. A standard for evaluating a hotspot may comprise various combinations of the above standards where compatible (e.g., an average level of inhibition of at least about a first amount and having no inhibition measurements below a threshold level of a second amount, lesser than the first amount).

[0513] It is therefore expressly contemplated that any iRNA agent, including the specific exemplary iRNA agents described herein, which targets a hotspot region of a target RNA, may be preferably selected for inducing RNA interference of the target mRNA as targeting such a hotspot region is likely to exhibit a robust inhibitory response relative to targeting a region which is not a hotspot region. RNAi agents targeting target sequences that substantially overlap (e.g., by at least about 70%, 75%, 80%, 85%, 90%, 95% of the target sequence length) or, preferably, that reside fully within the hotspot region may be considered to target the hotspot region. Hotspot regions of the RNA target(s) of the instant invention may include any region for which the data disclosed herein demonstrates higher frequency of targeting by efficacious RNAi agents, including by any of the standards described elsewhere herein, whether or not the range(s) of such hotspot region(s) are explicitly specified.

[0514] In various embodiments, a dsRNA agent of the present invention targets a hotspot region. In one embodiment, the hotspot region comprises the nucleotide sequence of any one of the sequences selected from SEQ ID Nos. 21-47 and 51-93. In another embodiment, the hotspot region comprises nucleotides 220-256, 220-266, 200-290 of SEQ ID NO: 13.

### III. Modified RNAi Agents of the Disclosure

[0515] In one embodiment, the nucleotide of the RNAi agent of the disclosure e.g., a dsRNA, is un-modified, and does not comprise, e.g., chemical modifications or conjugations known in the art and described herein. In preferred embodiments, the nucleotide of an RNAi agent of the disclosure, e.g., a dsRNA, is chemically modified to enhance stability or other beneficial characteristics. In certain embodiments of the disclosure, substantially all of the nucleotides of an RNAi agent of the disclosure are modified. In other embodiments of the disclosure, all of the nucleotides of an RNAi agent of the disclosure are modified. RNAi agents of the disclosure in which “substantially all of the nucleotides arc modified” are largely but not wholly modified and can include not more than 5, 4, 3, 2, or unmodified nucleotides. In still other embodiments of the disclosure, RNAi agents of the disclosure can include not more than 5, 4, 3, 2 or 1 modified nucleotides.

[0516] The nucleic acids featured in the disclosure can be synthesized or modified by methods well established in the art, such as those described in “Current protocols in nucleic acid chemistry.” Beaucage, S. L. et al. (Edrs.), John Wiley & Sons, Inc., New York, NY, USA, which is hereby incorporated herein by reference. Modifications include, for example, end modifications, e.g., 5′-end modifications (phosphorylation, conjugation, inverted linkages) or 3′-end modifications (conjugation, DNA nucleotides, inverted linkages, etc.); base modifications, e.g., replacement with stabilizing bases, destabilizing bases, or bases that base pair with an expanded repertoire of partners, removal of bases (abasic nucleotides), or conjugated bases; sugar modifications (e.g., at the 2′-position or 4′-position) or replacement of the sugar; or backbone modifications, including modification or replacement of the phosphodiester linkages. Specific examples of RNAi agents useful in the embodiments described herein include, but are not limited to. RNAs containing modified backbones or no natural internucleoside linkages. RNAs having modified backbones include, among others, those that do not have a phosphorus atom in the backbone. For the purposes of this specification, and as sometimes referenced in the art, modified RNAs that do not have a phosphorus atom in their internucleoside backbone can also be considered to be oligonucleosides. In some embodiments, a modified RNAi agent will have a phosphorus atom in its internucleoside backbone.

[0517] Modified RNA backbones include, for example, phosphorothioates, chiral phosphorothioates, phosphorodithioates, phosphotriesters, aminoalkylphosphotriesters, methyl and other alkyl phosphonates including 3′-alkylene phosphonates and chiral phosphonates, phosphinates, phosphoramidates including 3′-amino phosphoramidate and aminoalkylphosphoramidates, thionophosphoramidates, thionoalkylphosphonates, thionoalkylphosphotriesters, and boranophosphates having normal 3′-5′ linkages. 2′-5′-linked analogs of these, and those having inverted polarity wherein the adjacent pairs of nucleoside units are linked 3′-5′ to 5′-3′ or 2′-5′ to 5′-2′.

[0518] Various salts, mixed salts and free acid forms are also included. In some embodiments of the invention, the dsRNA agents of the invention are in a free acid form. In other embodiments of the invention, the dsRNA agents of the invention are in a salt form. In one embodiment, the dsRNA agents of the invention are in a sodium salt form. In certain embodiments, when the dsRNA agents of the invention are in the sodium salt form, sodium ions are present in the agent as counterions for substantially all of the phosphodiester and/or phosphorothioate groups present in the agent. Agents in which substantially all of the phosphodiester and/or phosphorothioate linkages have a sodium counterion include not more than 5, 4. 3, 2, or 1 phosphodiester and/or phosphorothioate linkages without a sodium counterion. In some embodiments, when the dsRNA agents of the invention are in the sodium salt form, sodium ions are present in the agent as counterions for all of the phosphodiester and/or phosphorothioate groups present in the agent.

[0519] Representative U.S. patents that teach the preparation of the above phosphorus-containing linkages include, but are not limited to, U.S. Pat. Nos. 3.687.808; 4.469.863; 4.476.301; 5.023,243; 5.177.195; 5.188.897; 5.264.423; 5.276.019; 5.278.302; 5.286.717; 5.321.131; 5.399.676; 5.405.939; 5.453.496; 5.455.233; 5.466.677; 5.476.925; 5.519.126; 5.536.821; 5.541.316; 5.550.111; 5.563.253; 5.571.799; 5.587.361; 5.625.050; 6.028.188; 6.124.445; 6.160.109; 6.169.170; 6.172.209; 6, 239.265; 6.277.603; 6.326.199; 6.346.614; 6.444.423; 6.531.590; 6.534.639; 6.608.035; 6.683.167; 6.858.715; 6.867.294; 6.878.805; 7.015.315; 7.041.816; 7.273.933; 7.321.029; and U.S. Pat. RE39464, the entire contents of each of which are hereby incorporated herein by reference.

[0520] Modified RNA backbones that do not include a phosphorus atom therein have backbones that are formed by short chain alkyl or cycloalkyl internucleoside linkages, mixed heteroatoms and alkyl or cycloalkyl internucleoside linkages, or one or more short chain heteroatomic or heterocyclic internucleoside linkages. These include those having morpholino linkages (formed in part from the sugar portion of a nucleoside); siloxane backbones; sulfide, sulfoxide and sulfone backbones; formacetyl and thioformacetyl backbones; methylene formacetyl and thioformacetyl backbones; alkene containing backbones; sulfamate backbones; methylencimino and methylenchydrazino backbones; sulfonate and sulfonamide backbones; amide backbones; and others having mixed N, O, S and CH₂ component parts.

[0521] Representative U.S. patents that teach the preparation of the above oligonucleosides include, but are not limited to, U.S. Pat. Nos. 5,034.506; 5,166.315; 5,185,444; 5,214,134; 5,216,141; 5.235,033; 5,64.562; 5,264,564; 5,405,938; 5,434,257; 5,466,677; 5,470,967; 5,489,677; 5,541,307; 5,561,225; 5,596,086; 5,602,240; 5,608,046; 5,610,289; 5,618,704; 5,623,070; 5,663,312; 5,633,360; 5,677.437; and, 5,677,439, the entire contents of each of which are hereby incorporated herein by reference.

[0522] In other embodiments, suitable RNA mimetics are contemplated for use in RNAi agents, in which both the sugar and the internucleoside linkage, i.e., the backbone, of the nucleotide units are replaced with novel groups. The base units are maintained for hybridization with an appropriate nucleic acid target compound. One such oligomeric compound, a RNA mimetic that has been shown to have excellent hybridization properties, is referred to as a peptide nucleic acid (PNA). In PNA compounds, the sugar backbone of an RNA is replaced with an amide containing backbone, in particular an aminocthylglycine backbone. The nucleobases are retained and are bound directly or indirectly to aza nitrogen atoms of the amide portion of the backbone. Representative U.S. patents that teach the preparation of PNA compounds include, but are not limited to, U.S. Pat. Nos. 5,539,082; 5.714,331; and 5,719,262, the entire contents of each of which are hereby incorporated herein by reference. Additional PNA compounds suitable for use in the RNAi agents of the disclosure are described in, for example, in Nielsen et al., Science, 1991, 254, 1497-1500.

[0523] Some embodiments featured in the disclosure include RNAs with phosphorothioate backbones and oligonucleosides with heteroatom backbones, and in particular —CH₂—NH—CH₂—, —CH₂—N(CH₃)—O—CH₂—[known as a methylene (methylimino) or MMI backbone], —CH₂—O—N(CH₃)—CH₂—, —CH₂—N(CH₃)—N(CH₃)—CH₂— and —N(CH₃)—CH₂—CH₂— [wherein the native phosphodiester backbone is represented as —O—P—O—CH₂—] of the above-referenced U.S. Pat. No. 5,489,677, and the amide backbones of the above-referenced U.S. Pat. No. 5,602,240. In some embodiments, the RNAs featured herein have morpholino backbone structures of the above-referenced U.S. Pat. No. 5,034,506.

[0524] Modified RNAs can also contain one or more substituted sugar moieties. The RNAi agents, e.g., dsRNAs, featured herein can include one of the following at the 2′-position: OH; F; O-. S-, or N-alkyl; O-, S-, or N-alkenyl; O-, S- or N-alkynyl; or O-alkyl-O-alkyl, wherein the alkyl, alkenyl and alkynyl can be substituted or unsubstituted C₁ to C₁₀ alkyl or C₂ to C₁₀ alkenyl and alkynyl. Exemplary suitable modifications include O[(CH₂)ₙO]_{mC}H₃, O(CH₂).ₙOCH₃, O(CH₂), NH₂, O(CH₂)ₙ CH₃, O(CH₂), ONH₂, and O(CH₂)ON[(CH₂), CH₃)]2, where n and m are from 1 to about 10. In other embodiments, dsRNAs include one of the following at the 2′ position: C₁ to C₁₀ lower alkyl, substituted lower alkyl, alkaryl, aralkyl, O-alkaryl or O-aralkyl, SH, SCH₃, OCN, Cl, Br, CN, CF₃, OCH₃, SOCH₃, SO_{2C}H₃, ONO₂, NO₂, N₃, NH₂, heterocycloalkyl, heterocycloalkaryl, aminoalkylamino, polyalkylamino, substituted silyl, an RNA cleaving group, a reporter group, an intercalator, a group for improving the pharmacokinetic properties of an RNAi agent, or a group for improving the pharmacodynamic properties of an RNAi agent, and other substituents having similar properties. In some embodiments, the modification includes a 2′-methoxyethoxy (2′-O—CH_{2C}H₂OCH₃, also known as 2′-O-(2-methoxyethyl) or 2′-MOE) (Martin et al., Helv. Chim. Acta, 1995, 78:486-504) i.e., an alkoxy-alkoxy group. Another exemplary modification is 2′-dimethylaminooxyethoxy, i.e., a O(CH₂)₂ON(CH₃)₂ group, also known as 2′-DMAOE, as described in examples herein below, and 2′-dimethylaminoethoxyethoxy (also known in the art as 2′-O-dimethylaminocthoxyethyl or 2′-DMAEOE), i.e., 2′-O—CH₂—O—CH₂—N(CH₂)₂. Further exemplary modifications include: 5′-Me-2′-F nucleotides, 5′-Me-2′-OMe nucleotides, 5′-Me-2′-deoxynucleotides, (both R and S isomers in these three families); 2′-alkoxyalkyl; and 2′-NMA (N-methylacetamide).

[0525] Other modifications include 2′-methoxy (2′—OCH₃), 2′-aminopropoxy (2′—OCH_{2C}H_{2C}H₂NH₂), 2′-O-hexadecyl, and 2′-fluoro (2′-F). Similar modifications can also be made at other positions on the RNA of an RNAi agent, particularly the 3′ position of the sugar on the 3′ terminal nucleotide or in 2′-5′ linked dsRNAs and the 5′ position of 5′ terminal nucleotide. RNAi agents can also have sugar mimetics such as cyclobutyl moieties in place of the pentofuranosyl sugar. Representative U.S. patents that teach the preparation of such modified sugar structures include, but are not limited to, U.S. Pat. Nos. 4,981,957; 5,118,800; 5.319,080; 5.359,044; 5,393,878; 5,446,137; 5,466,786; 5.514,785; 5,519,134; 5,567,811; 5,576,427; 5,591,722; 5,597,909; 5,610,300; 5,627,053; 5,639,873; 5,646.265; 5,658,873; 5,670,633; and 5,700,920, certain of which are commonly owned with the instant application. The entire contents of each of the foregoing are hereby incorporated herein by reference.

[0526] An RNAi agent of the disclosure can also include nucleobase (often referred to in the art simply as “base”) modifications or substitutions. As used herein, “unmodified” or “natural” nucleobases include the purine bases adenine (A) and guanine (G), and the pyrimidine bases thymine (T), cytosine (C) and uracil (U). Modified nucleobases include other synthetic and natural nucleobases such as 5-methylcytosine (5-me-C), 5-hydroxymethyl cytosine, xanthine, hypoxanthine, 2-aminoadenine, 6-methyl and other alkyl derivatives of adenine and guanine, 2-propyl and other alkyl derivatives of adenine and guanine, 2-thiouracil, 2-thiothymine and 2-thiocytosine, 5-halouracil and cytosine, 5-propynyl uracil and cytosine, 6-azo uracil, cytosine and thymine, 5-uracil (pseudouracil), 4-thiouracil, 8-halo, 8-amino, 8-thiol, 8-thioalkyl, 8-hydroxyl anal other 8-substituted adenines and guanines, 5-halo, particularly 5-bromo, 5-trifluoromethyl and other 5-substituted uracils and cytosines, 7-methylguanine and 7-methyladenine, 8-azaguanine and 8-azaadenine, 7-deazaguanine and 7-daazaadenine and 3-deazaguanine and 3-deazaadenine. Further nucleobases include those disclosed in U.S. Pat. No. 3,687,808, those disclosed in Modified Nucleosides in Biochemistry, Biotechnology and Medicine, Herdewijn, P, ed. Wiley-VCH, 2008; those disclosed in The Concise Encyclopedia Of Polymer Science And Engineering, pages 858-859, Kroschwitz, J. L, ed. John Wiley & Sons, 1990, these disclosed by Englisch et al., (1991) Angewandte Chemie, International Edition, 30:613, and those disclosed by Sanghvi, Y S., Chapter 15, dsRNA Research and Applications, pages 289-302, Crooke, S. T. and Lebleu, B., Ed., CRC Press, 1993. Certain of these nucleobases are particularly useful for increasing the binding affinity of the oligomeric compounds featured in the disclosure. These include 5-substituted pyrimidines, 6-azapyrimidines and N-2, N-6 and 0-6 substituted purines, including 2-aminopropyladenine, 5-propynyluracil and 5-propynylcytosine. 5-methylcytosine substitutions have been shown to increase nucleic acid duplex stability by 0.6-1.2° ° C. (Sanghvi, Y. S., Crooke, S. T. and Lebleu, B., Eds., dsRNA Research and Applications, CRC Press, Boca Raton, 1993, pp. 276-278) and are exemplary base substitutions, even more particularly when combined with 2′-O-methoxyethyl sugar modifications.

[0527] Representative U.S. patents that teach the preparation of certain of the above noted modified nucleobases as well as other modified nucleobases include, but are not limited to, the above noted U.S. Pat. Nos. 3,687,808, 4,845,205; 5,130,30; 5,134,066; 5,175,273; 5,367,066; 5,432,272; 5,457,187; 5,459,255; 5,484,908; 5,502,177; 5,525,711; 5,552,540; 5,587,469; 5,594,121, 5,596,091; 5,614,617; 5,681,941; 5,750,692; 6,015,886; 6,147,200; 6,166,197; 6,222,025; 6,235,887; 6,380,368; 6,528,640; 6,639,062; 6,617,438; 7.045,610; 7,427,672; and 7,495,088, the entire contents of each of which are hereby incorporated herein by reference.

[0528] An RNAi agent of the disclosure can also be modified to include one or more locked nucleic acids (LNA). A locked nucleic acid is a nucleotide having a modified ribose moiety in which the ribose moiety comprises an extra bridge connecting the 2′ and 4′ carbons. This structure effectively “locks” the ribose in the 3′-endo structural conformation. The addition of locked nucleic acids to siRNAs has been shown to increase siRNA stability in serum, and to reduce off-target effects (Elmen, J. et al., (2005) Nucleic Acids Research 33(1):439-447; Mook, O R. et al., (2007) Mol Canc Ther 6(3):833-843; Grunweller, A. et al., (2003) Nucleic Acids Research 31(12):3185-3193).

[0529] An RNAi agent of the disclosure can also be modified to include one or more bicyclic sugar moieties. A “bicyclic sugar” is a furanosyl ring modified by the bridging of two atoms. A “bicyclic nucleoside” (“BNA”) is a nucleoside having a sugar moiety comprising a bridge connecting two carbon atoms of the sugar ring, thereby forming a bicyclic ring system. In certain embodiments, the bridge connects the 4′-carbon and the 2′-carbon of the sugar ring. Thus, in some embodiments an agent of the disclosure may include one or more locked nucleic acids (LNA). A locked nucleic acid is a nucleotide having a modified ribose moiety in which the ribose moiety comprises an extra bridge connecting the 2′ and 4′ carbons. In other words, an LNA is a nucleotide comprising a bicyclic sugar moiety comprising a 4′-CH₂—O-2′ bridge. This structure effectively “locks” the ribose in the 3′-endo structural conformation. The addition of locked nucleic acids to siRNAs has been shown to increase siRNA stability in serum, and to reduce off-target effects (Elmen, J. et al., (2005) Nucleic Acids Research 33(1):439-447; Mook, O R. et al., (2007) Mol Canc Ther 6(3):833-843; Grunweller, A. et al., (2003) Nucleic Acids Research 31(12):3185-3193). Examples of bicyclic nucleosides for use in the polynucleotides of the disclosure include without limitation nucleosides comprising a bridge between the 4′ and the 2′ ribosyl ring atoms. In certain embodiments, the antisense polynucleotide agents of the disclosure include one or more bicyclic nucleosides comprising a 4′ to 2′ bridge. Examples of such 4′ to 2′ bridged bicyclic nucleosides, include but are not limited to 4′-(CH₂)—O-2′ (LNA); 4′-(CH₂)—S-2′; 4′-(CH₂)₂—O-2′ (ENA); 4′-CH(CH₃)—O-2′ (also referred to as “constrained ethyl” or “cEt”) and 4′-CH(CH₂OCH₃)—O-2′ (and analogs thereof; see, e.g., U.S. Pat. No. 7,399,845); 4′-C(CH₃)(CH₃)—O-2′ (and analogs thereof; see e.g., U.S. Pat. No. 8,278,283); 4′-CH₂—N(OCH₃)-2′ (and analogs thereof; see e.g., U.S. Pat. No. 8,278,425); 4′-CH₂—O—N(CH₃)-2′ (see, e.g., U.S. Patent Publication No. 2004/0171570); 4′-CH₂—N(R)—O-2′, wherein R is H, C₁-C₁₂ alkyl, or a protecting group (see, e.g., U.S. Pat. No. 7,427,672); 4′-CH₂—C(H)(CH₃)-2′ (sec, e.g., Chattopadhyaya et al., J. Org. Chem., 2009, 74, 118-134); and 4′-CH₂—C(═CH₂)-2′ (and analogs thereof; see, e.g., U.S. Pat. No. 8,278,426). The entire contents of each of the foregoing are hereby incorporated herein by reference.

[0530] Additional representative US Patents and US Patent Publications that teach the preparation of locked nucleic acid nucleotides include, but are not limited to, the following: U.S. Pat. Nos. 6,268,490; 6,525,191; 6,670,461; 6,770,748; 6,794,499; 6,998,484; 7,053,207; 7,034,133; 7,084,125; 7,399,845; 7,427,672; 7,569,686; 7,741,457; 8,022,193; 8,030,467; 8,278,425; 8,278,426; 8,278,283; US 2008/0039618; and US 2009/0012281, the entire contents of each of which are hereby incorporated herein by reference.

[0531] Any of the foregoing bicyclic nucleosides can be prepared having one or more stereochemical sugar configurations including for example α-L-ribofuranose and ß-D-ribofuranose (see WO 99/14226).

[0532] An RNAi agent of the disclosure can also be modified to include one or more constrained ethyl nucleotides. As used herein, a “constrained ethyl nucleotide” or “cEt” is a locked nucleic acid comprising a bicyclic sugar moiety comprising a 4′-CH(CH₃)—O-2′ bridge. In one embodiment, a constrained ethyl nucleotide is in the S conformation referred to herein as “S-cEt.”

[0533] An RNAi agent of the disclosure may also include one or more “conformationally restricted nucleotides” (“CRN”). CRN are nucleotide analogs with a linker connecting the C₂′ and C₄′ carbons of ribose or the C₃ and -C₅′ carbons of ribose. CRN lock the ribose ring into a stable conformation and increase the hybridization affinity to mRNA. The linker is of sufficient length to place the oxygen in an optimal position for stability and affinity resulting in less ribose ring puckering.

[0534] Representative publications that teach the preparation of certain of the above noted CRN include, but are not limited to, US 2013/0190383; and WO 2013/036868, the entire contents of each of which are hereby incorporated herein by reference.

[0535] In some embodiments, an RNAi agent of the disclosure comprises one or more monomers that are UNA (unlocked nucleic acid) nucleotides. UNA is unlocked acyclic nucleic acid, wherein any of the bonds of the sugar has been removed, forming an unlocked “sugar” residue. In one example, UNA also encompasses monomer with bonds between C₁′-C₄′ have been removed (i.e. the covalent carbon-oxygen-carbon bond between the C₁′ and C₄′ carbons). In another example, the C₂′-C₃′ bond (i.e. the covalent carbon-carbon bond between the C₂′ and C₃′ carbons) of the sugar has been removed (see Nuc. Acids Symp. Series, 52, 133-134 (2008) and Fluiter et al., Mol. Biosyst., 2009, 10, 1039 hereby incorporated by reference).

[0536] Representative U.S. publications that teach the preparation of UNA include, but are not limited to, U.S. Pat. No. 8,314,227; and US Patent Publication Nos. 2013/0096289; 2013/0011922; and 2011/0313020, the entire contents of each of which are hereby incorporated herein by reference.

[0537] Potentially stabilizing modifications to the ends of RNA molecules can include N-(acetylaminocaproyl)-4-hydroxyprolinol (Hyp-C₆-NHAc), N-(caproyl-4-hydroxyprolinol (Hyp-C₆), N-(acetyl-4-hydroxyprolinol (Hyp-NHAc), thymidine-2′-O-deoxythymidine (ether), N-(aminocaproyl)-4-hydroxyprolinol (Hyp-C₆-amino), 2-docosanoyl-uridine-3′-phosphate, inverted 2′-deoxy-modified ribonucleotide, such as inverted dT(idT), inverted dA (idA), and inverted abasic 2′-deoxyribonucleotide (iAb) and others. Disclosure of this modification can be found in WO 2011/005861.

[0538] In one example, the 3′ or 5′ terminal end of a oligonucleotide is linked to an inverted 2′-deoxy-modified ribonucleotide, such as inverted dT(idT), inverted dA (idA), or a inverted abasic 2′-deoxyribonucleotide (iAb). In one particular example, the inverted 2′-deoxy-modified ribonucleotide is linked to the 3′end of an oligonucleotide, such as the 3′-end of a sense strand described herein, where the linking is via a 3′-3′ phosphodiester linkage or a 3′-3′-phosphorothioate linkage.

[0539] In another example, the 3′-end of a sense strand is linked via a 3′-3′-phosphorothioate linkage to an inverted abasic ribonucleotide (iAb). In another example, the 3′-end of a sense strand is linked via a 3′-3′-phosphorothioate linkage to an inverted dA (idA).

[0540] In another example, the 5′-end of a sense strand is linked via a 3′-3′-phosphorothioate linkage to an inverted abasic ribonucleotide (iAb). In another example, the 5′-end of a sense strand is linked via a 3′-3′-phosphorothioate linkage to an inverted dA (idA).

[0541] In another example, the 3′- and 5′-ends of a sense strand are linked via a 3′-3′-phosphorothioate linkages to inverted abasic ribonucleotides (iAb). In another example, the 3′- and 5′-ends of a sense strand are linked via a 3′-3′-phosphorothioate linkages to inverted dAs (idA).

[0542] In one particular example, the inverted 2′-deoxy-modified ribonucleotide is linked to the 3′end of an oligonucleotide, such as the 3′-end of a sense strand described herein, where the linking is via a 3′-3′ phosphodiester linkage or a 3′-3′-phosphorothioate linkage.

[0543] In another example, the 3′-terminal nucleotides of a sense strand is an inverted dA (idA) and is linked to the preceding nucleotide via a 3′-3′-linkage (e.g., 3′-3′-phosphorothioate linkage).

[0544] Other modifications of an RNAi agent of the disclosure include a 5′ phosphate or 5′ phosphate mimic, e.g., a 5′-terminal phosphate or phosphate mimic on the antisense strand of an RNAi agent. Suitable phosphate mimics are disclosed in, for example US 2012/0157511, the entire contents of which are incorporated herein by reference.

A. Modified RNAi agents Comprising Motifs of the Disclosure

[0545] In certain aspects of the disclosure, the double-stranded RNAi agents of the disclosure include agents with chemical modifications as disclosed, for example, in WO 2013/075035, the entire contents of which are incorporated herein by reference. As shown herein and in WO 2013/075035, a superior result may be obtained by introducing one or more motifs of three identical modifications on three consecutive nucleotides into a sense strand or antisense strand of an RNAi agent, particularly at or near the cleavage site. In some embodiments, the sense strand and antisense strand of the RNAi agent may otherwise be completely modified. The introduction of these motifs interrupts the modification pattern, if present, of the sense or antisense strand. The RNAi agent may be optionally conjugated with a lipophilic ligand, e.g., a C16 ligand, for instance on the sense strand. The RNAi agent may be optionally modified with a (S)-glycol nucleic acid (GNA) modification, for instance on one or more residues of the antisense strand. The resulting RNAi agents present superior gene silencing activity.

[0546] Accordingly, the disclosure provides double stranded RNAi agents capable of inhibiting the expression of a target gene (i.e., a C9orf72 gene) in vivo. The RNAi agent comprises a sense strand and an antisense strand. Each strand of the RNAi agent may be 15-30 nucleotides in length. For example, each strand may be 16-30 nucleotides in length, 17-30 nucleotides in length, 25-30 nucleotides in length, 27-30 nucleotides in length, 17-23 nucleotides in length, 17-21 nucleotides in length, 17-19 nucleotides in length, 19-25 nucleotides in length. 19-23 nucleotides in length, 19-21 nucleotides in length, 21-25 nucleotides in length, or 21-23 nucleotides in length. In certain embodiments, each strand is 19-23 nucleotides in length.

[0547] The sense strand and antisense strand typically form a duplex double stranded RNA (“dsRNA”), also referred to herein as an “RNAi agent.” The duplex region of an RNAi agent may be 15-30 nucleotide pairs in length. For example, the duplex region can be 16-30 nucleotide pairs in length, 17-30 nucleotide pairs in length, 27-30 nucleotide pairs in length, 17-23 nucleotide pairs in length, 17-21 nucleotide pairs in length, 17-19 nucleotide pairs in length, 19-25 nucleotide pairs in length, 19-23 nucleotide pairs in length, 19-21 nucleotide pairs in length, 21-25 nucleotide pairs in length, or 21-23 nucleotide pairs in length. In another example, the duplex region is selected from 15, 16, 17, 18, 19, 20, 21, 22, 23, 24, 25, 26, and 27 nucleotides in length. In preferred embodiments, the duplex region is 19-21 nucleotide pairs in length.

[0548] In one embodiment, the RNAi agent may contain one or more overhang regions or capping groups at the 3′-end, 5′-end, or both ends of one or both strands. The overhang can be 1-6 nucleotides in length, for instance 2-6 nucleotides in length, 1-5 nucleotides in length, 2-5 nucleotides in length, 1-4 nucleotides in length, 2-4 nucleotides in length, 1-3 nucleotides in length, 2-3 nucleotides in length, or 1-2 nucleotides in length. In preferred embodiments, the nucleotide overhang region is 2 nucleotides in length. The overhangs can be the result of one strand being longer than the other, or the result of two strands of the same length being staggered. The overhang can form a mismatch with the target mRNA or it can be complementary to the gene sequences being targeted or can be another sequence. The first and second strands can also be joined, e.g., by additional bases to form a hairpin, or by other non-base linkers.

[0549] In one embodiment, the nucleotides in the overhang region of the RNAi agent can each independently be a modified or unmodified nucleotide including, but no limited to 2′-sugar modified, such as, 2-F. 2′-O-methyl, thymidine (T), and any combinations thereof.

[0550] For example, TT can be an overhang sequence for either end on either strand. The overhang can form a mismatch with the target mRNA or it can be complementary to the gene sequences being targeted or can be another sequence.

[0551] The 5′- or 3′-overhangs at the sense strand, antisense strand or both strands of the RNAi agent may be phosphorylated. In some embodiments, the overhang region(s) contains two nucleotides having a phosphorothioate between the two nucleotides, where the two nucleotides can be the same or different. In one embodiment, the overhang is present at the 3′-end of the sense strand, antisense strand, or both strands. In one embodiment, this 3′-overhang is present in the antisense strand. In one embodiment, this 3′-overhang is present in the sense strand.

[0552] The RNAi agent may contain only a single overhang, which can strengthen the interference activity of the RNAi, without affecting its overall stability. For example, the single-stranded overhang may be located at the 3′-terminal end of the sense strand or, alternatively, at the 3′-terminal end of the antisense strand. The RNAi may also have a blunt end, located at the 5′-end of the antisense strand (or the 3′-end of the sense strand) or vice versa. Generally, the antisense strand of the RNAi has a nucleotide overhang at the 3′-end, and the 5′-end is blunt. While not wishing to be bound by theory, the asymmetric blunt end at the 5′-end of the antisense strand and 3′-end overhang of the antisense strand favor the guide strand loading into RISC process.

[0553] In one embodiment, the RNAi agent is a double ended bluntmer of 19 nucleotides in length, wherein the sense strand contains at least one motif of three 2′-F modifications on three consecutive nucleotides at positions 7, 8, 9 from the 5′end. The antisense strand contains at least one motif of three 2′-O-methyl modifications on three consecutive nucleotides at positions 11, 12, 13 from the 5′end.

[0554] In another embodiment, the RNAi agent is a double ended bluntmer of 20 nucleotides in length, wherein the sense strand contains at least one motif of three 2′-F modifications on three consecutive nucleotides at positions 8, 9, 10 from the 5′ end. The antisense strand contains at least one motif of three 2′-O-methyl modifications on three consecutive nucleotides at positions 11, 12, 13 from the 5′ end.

[0555] In yet another embodiment, the RNAi agent is a double ended bluntmer of 21 nucleotides in length, wherein the sense strand contains at least one motif of three 2′-F modifications on three consecutive nucleotides at positions 9, 10, 11 from the 5′ end. The antisense strand contains at least one motif of three 2′-O-methyl modifications on three consecutive nucleotides at positions 11, 12, 13 from the 5′ end.

[0556] In one embodiment, the RNAi agent comprises a 21 nucleotide sense strand and a 23 nucleotide antisense strand, wherein the sense strand contains at least one motif of three 2′-F modifications on three consecutive nucleotides at positions 9, 10, 11 from the 5′ end; the antisense strand contains at least one motif of three 2′-O-methyl modifications on three consecutive nucleotides at positions 11, 12, 13 from the 5′ end, wherein one end of the RNAi agent is blunt, while the other end comprises a 2 nucleotide overhang. Preferably, the 2 nucleotide overhang is at the 3′-end of the antisense strand. When the 2 nucleotide overhang is at the 3′-end of the antisense strand, there may be two phosphorothioate internucleotide linkages between the terminal three nucleotides, wherein two of the three nucleotides are the overhang nucleotides, and the third nucleotide is a paired nucleotide next to the overhang nucleotide. In one embodiment, the RNAi agent additionally has two phosphorothioate internucleotide linkages between the terminal three nucleotides at both the 5′-end of the sense strand and at the 5′-end of the antisense strand. In one embodiment, every nucleotide in the sense strand and the antisense strand of the RNAi agent, including the nucleotides that are part of the motifs are modified nucleotides. In one embodiment each residue is independently modified with a 2′-O-methyl or 3′-fluoro, e.g., in an alternating motif. Optionally, the RNAi agent further comprises a ligand (e.g., a lipophilic ligand, optionally a C16 ligand).

[0557] In one embodiment, the RNAi agent comprises a sense and an antisense strand, wherein the sense strand is 25-30 nucleotide residues in length, wherein starting from the 5′ terminal nucleotide (position 1) positions 1 to 23 of the first strand comprise at least 8 ribonucleotides; the antisense strand is 36-66 nucleotide residues in length and, starting from the 3′ terminal nucleotide, comprises at least 8 ribonucleotides in the positions paired with positions 1-23 of sense strand to form a duplex; wherein at least the 3 ‘ terminal nucleotide of antisense strand is unpaired with sense strand, and up to 6 consecutive 3’ terminal nucleotides are unpaired with sense strand, thereby forming a 3′ single stranded overhang of 1-6 nucleotides; wherein the 5′ terminus of antisense strand comprises from 10-30 consecutive nucleotides which are unpaired with sense strand, thereby forming a 10-30 nucleotide single stranded 5′ overhang; wherein at least the sense strand 5′ terminal and 3′ terminal nucleotides are base paired with nucleotides of antisense strand when sense and antisense strands are aligned for maximum complementarity, thereby forming a substantially duplexed region between sense and antisense strands; and antisense strand is sufficiently complementary to a target RNA along at least 19 ribonucleotides of antisense strand length to reduce target gene expression when the double stranded nucleic acid is introduced into a mammalian cell; and wherein the sense strand contains at least one motif of three 2′-F modifications on three consecutive nucleotides, where at least one of the motifs occurs at or near the cleavage site. The antisense strand contains at least one motif of three 2′-O-methyl modifications on three consecutive nucleotides at or near the cleavage site.

[0558] In one embodiment, the RNAi agent comprises sense and antisense strands, wherein the RNAi agent comprises a first strand having a length which is at least 25 and at most 29 nucleotides and a second strand having a length which is at most 30 nucleotides with at least one motif of three 2′-O-methyl modifications on three consecutive nucleotides at position 11, 12, 13 from the 5′ end; wherein the 3′ end of the first strand and the 5′ end of the second strand form a blunt end and the second strand is 1˜4 nucleotides longer at its 3′ end than the first strand, wherein the duplex region which is at least 25 nucleotides in length, and the second strand is sufficiently complementary to a target mRNA along at least 19 nucleotide of the second strand length to reduce target gene expression when the RNAi agent is introduced into a mammalian cell, and wherein dicer cleavage of the RNAi agent preferentially results in an siRNA comprising the 3′ end of the second strand, thereby reducing expression of the target gene in the mammal. Optionally, the RNAi agent further comprises a ligand.

[0559] In one embodiment, the sense strand of the RNAi agent contains at least one motif of three identical modifications on three consecutive nucleotides, where one of the motifs occurs at the cleavage site in the sense strand.

[0560] In one embodiment, the antisense strand of the RNAi agent can also contain at least one motif of three identical modifications on three consecutive nucleotides, where one of the motifs occurs at or near the cleavage site in the antisense strand.

[0561] For an RNAi agent having a duplex region of 17-23 nucleotide in length, the cleavage site of the antisense strand is typically around the 10, 11 and 12 positions from the 5′-end. Thus the motifs of three identical modifications may occur at the 9, 10, 11 positions; 10, 11, 12 positions; 11, 12, 13 positions; 12, 13, 14 positions; or 13, 14, 15 positions of the antisense strand, the count starting from the 1^{st} nucleotide from the 5′-end of the antisense strand, or, the count starting from the 1^{st} paired nucleotide within the duplex region from the 5′-end of the antisense strand. The cleavage site in the antisense strand may also change according to the length of the duplex region of the RNAi from the 5′-end.

[0562] The sense strand of the RNAi agent may contain at least one motif of three identical modifications on three consecutive nucleotides at the cleavage site of the strand; and the antisense strand may have at least one motif of three identical modifications on three consecutive nucleotides at or near the cleavage site of the strand. When the sense strand and the antisense strand form a dsRNA duplex, the sense strand and the antisense strand can be so aligned that one motif of the three nucleotides on the sense strand and one motif of the three nucleotides on the antisense strand have at least one nucleotide overlap, i.e., at least one of the three nucleotides of the motif in the sense strand forms a base pair with at least one of the three nucleotides of the motif in the antisense strand. Alternatively, at least two nucleotides may overlap, or all three nucleotides may overlap.

[0563] In one embodiment, the sense strand of the RNAi agent may contain more than one motif of three identical modifications on three consecutive nucleotides. The first motif may occur at or near the cleavage site of the strand and the other motifs may be a wing modification. The term “wing modification” herein refers to a motif occurring at another portion of the strand that is separated from the motif at or near the cleavage site of the same strand. The wing modification is either adjacent to the first motif or is separated by at least one or more nucleotides. When the motifs are immediately adjacent to each other then the chemistry of the motifs are distinct from each other and when the motifs are separated by one or more nucleotide than the chemistries can be the same or different. Two or more wing modifications may be present. For instance, when two wing modifications are present, each wing modification may occur at one end relative to the first motif which is at or near cleavage site or on either side of the lead motif.

[0564] Like the sense strand, the antisense strand of the RNAi agent may contain more than one motif of three identical modifications on three consecutive nucleotides, with at least one of the motifs occurring at or near the cleavage site of the strand. This antisense strand may also contain one or more wing modifications in an alignment similar to the wing modifications that may be present on the sense strand.

[0565] In one embodiment, the wing modification on the sense strand or antisense strand of the RNAi agent typically does not include the first one or two terminal nucleotides at the 3′-end, 5′-end or both ends of the strand.

[0566] In another embodiment, the wing modification on the sense strand or antisense strand of the RNAi agent typically does not include the first one or two paired nucleotides within the duplex region at the 3′-end, 5′-end or both ends of the strand.

[0567] When the sense strand and the antisense strand of the RNAi agent each contain at least one wing modification, the wing modifications may fall on the same end of the duplex region, and have an overlap of one, two or three nucleotides.

[0568] When the sense strand and the antisense strand of the RNAi agent each contain at least two wing modifications, the sense strand and the antisense strand can be so aligned that two modifications each from one strand fall on one end of the duplex region, having an overlap of one, two or three nucleotides; two modifications each from one strand fall on the other end of the duplex region, having an overlap of one, two or three nucleotides; two modifications one strand fall on each side of the lead motif, having an overlap of one, two, or three nucleotides in the duplex region.

[0569] In one embodiment, the RNAi agent comprises mismatch(es) with the target, within the duplex, or combinations thereof. The mismatch may occur in the overhang region or the duplex region. The base pair may be ranked on the basis of their propensity to promote dissociation or melting (e.g., on the free energy of association or dissociation of a particular pairing, the simplest approach is to examine the pairs on an individual pair basis, though next neighbor or similar analysis can also be used). In terms of promoting dissociation: A:U is preferred over G:C; G:U is preferred over G:C; and I:C is preferred over G:C (I=inosine). Mismatches, e.g., non-canonical or other than canonical pairings (as described elsewhere herein) are preferred over canonical (A:T, A:U, G:C) pairings; and pairings which include a universal base are preferred over canonical pairings.

[0570] In one embodiment, the RNAi agent comprises at least one of the first 1, 2, 3, 4, or 5 base pairs within the duplex regions from the 5′-end of the antisense strand independently selected from the group of: A:U. G:U. I:C, and mismatched pairs, e.g., non-canonical or other than canonical pairings or pairings which include a universal base, to promote the dissociation of the antisense strand at the 5′-end of the duplex.

[0571] In one embodiment, the nucleotide at the 1 position within the duplex region from the 5′-end in the antisense strand is selected from the group consisting of A, dA, dU, U, and dT. Alternatively, at least one of the first 1, 2 or 3 base pair within the duplex region from the 5′-end of the antisense strand is an AU base pair. For example, the first base pair within the duplex region from the 5′-end of the antisense strand is an AU base pair.

[0572] In another embodiment, the nucleotide at the 3′-end of the sense strand is deoxy-thymine (dT). In another embodiment, the nucleotide at the 3′-end of the antisense strand is deoxy-thymine (dT). In one embodiment, there is a short sequence of deoxy-thymine nucleotides, for example, two dT nucleotides on the 3′-end of the sense or antisense strand.

[0573] In one embodiment, the sense strand sequence may be represented by formula (I):

[chemical structure]

[0574] wherein:
[0575] i and j are each independently 0 or 1;
[0576] p and q are each independently 0-6;
[0577] each Nₐ independently represents an oligonucleotide sequence comprising 0-25 modified nucleotides, each sequence comprising at least two differently modified nucleotides;
[0578] each N_{b} independently represents an oligonucleotide sequence comprising 0-10 modified nucleotides;
[0579] each nₚ and nq independently represent an overhang nucleotide;
[0580] wherein N_{b} and Y do not have the same modification; and
[0581] XXX, YYY and ZZZ each independently represent one motif of three identical modifications on three consecutive nucleotides. Preferably YYY is all 2′-F modified nucleotides.

[0582] In one embodiment, the Nₐ or N_{b} comprise modifications of alternating pattern.

[0583] In one embodiment, the YYY motif occurs at or near the cleavage site of the sense strand. For example, when the RNAi agent has a duplex region of 17-23 nucleotides in length, the YYY motif can occur at or the vicinity of the cleavage site (e.g.: can occur at positions 6, 7, 8, 7, 8, 9, 8, 9, 10, 9, 10, 11, 10, 11,12 or 11, 12, 13) of—the sense strand, the count starting from the 1st nucleotide, from the 5′-end; or optionally, the count starting at the 1st paired nucleotide within the duplex region, from the 5′-end.

[0584] In one embodiment, i is 1 and j is 0, or i is 0 and j is 1, or both i and j are 1. The sense strand can therefore be represented by the following formulas:

[chemical structure]

[0585] When the sense strand is represented by formula (Ib), N_{b} represents an oligonucleotide sequence comprising 0-10, 0-7, 0-5, 0-4, 0-2 or 0 modified nucleotides.

[0586] Each Nₐ independently can represent an oligonucleotide sequence comprising 2-20, 2-15, or 2-10 modified nucleotides.

[0587] When the sense strand is represented as formula (Ic), N_{b} represents an oligonucleotide sequence comprising 0-10, 0-7, 0-10, 0-7, 0-5, 0-4, 0-2 or 0 modified nucleotides. Each Nₐ can independently represent an oligonucleotide sequence comprising 2-20, 2-15, or 2-10 modified nucleotides.

[0588] When the sense strand is represented as formula (Id), each N_{b} independently represents an oligonucleotide sequence comprising 0-10, 0-7, 0-5, 0-4, 0-2 or 0 modified nucleotides. Preferably, N_{b} is 0, 1, 2, 3, 4, 5 or 6. Each Nₐ can independently represent an oligonucleotide sequence comprising 2-20, 2-15, or 2-10 modified nucleotides.

[0589] Each of X, Y and Z may be the same or different from each other.

[0590] In other embodiments, i is 0 and j is 0, and the sense strand may be represented by the formula:

[chemical structure]

[0591] When the sense strand is represented by formula (Ia), each Nₐ independently can represent an oligonucleotide sequence comprising 2-20, 2-15, or 2-10 modified nucleotides.

[0592] In one embodiment, the antisense strand sequence of the RNAi may be represented by formula (II):

[chemical structure]

[0593] wherein:
[0594] k and I are each independently 0 or 1;
[0595] p′ and q′ are each independently 0-6;
   each Nₐ′ independently represents an oligonucleotide sequence comprising 0-25 modified nucleotides, each sequence comprising at least two differently modified nucleotides;
   each N_{b}′ independently represents an oligonucleotide sequence comprising 0-10 modified nucleotides;
   each nₚ′ and nq′ independently represent an overhang nucleotide;
   wherein No′ and Y′ do not have the same modification;
   and X′X′X′, Y′Y′Y′ and Z′Z′Z′ each independently represent one motif of three identical modifications on three consecutive nucleotides.
   In one embodiment, the Nₐ′ or N_{b}′ comprise modifications of alternating pattern.

[0596] The Y′Y′Y′ motif occurs at or near the cleavage site of the antisense strand. For example, when the RNAi agent has a duplex region of 17-23nucleotidein length, the Y′Y′Y′ motif can occur at positions 9, 10, 11; 10, 11, 12; 11, 12, 13; 12, 13, 14; or 13, 14, 15 of the antisense strand, with the count starting from the 1st nucleotide, from the 5′-end; or optionally, the count starting at the 1st paired nucleotide within the duplex region, from the 5′-end. Preferably, the Y′Y′Y′ motif occurs at positions 11, 12, 13.

[0597] In one embodiment, Y′Y′Y′ motif is all 2′-OMe modified nucleotides.

[0598] In one embodiment, k is 1 and 1 is 0, or k is 0 and 1 is 1, or both k and I are 1.

[0599] The antisense strand can therefore be represented by the following formulas:

[chemical structure]

[0600] When the antisense strand is represented by formula (IIb), No′ represents an oligonucleotide sequence comprising 0-10, 0-7, 0-10, 0-7, 0-5, 0-4, 0-2 or 0 modified nucleotides. Each Nₐ′ independently represents an oligonucleotide sequence comprising 2-20, 2-15, or 2-10 modified nucleotides.

[0601] When the antisense strand is represented as formula (IIc), N_{b}′ represents an oligonucleotide sequence comprising 0-10, 0-7, 0-10, 0-7, 0-5, 0-4, 0-2 or 0 modified nucleotides. Each Nₐ′ independently represents an oligonucleotide sequence comprising 2-20, 2-15, or 2-10 modified nucleotides.

[0602] When the antisense strand is represented as formula (IId), each N_{b}′ independently represents an oligonucleotide sequence comprising 0-10, 0-7, 0-10, 0-7, 0-5, 0-4, 0-2 or 0 modified nucleotides. Each Nₐ′ independently represents an oligonucleotide sequence comprising 2-20, 2-15, or 2-10 modified nucleotides. Preferably, N_{b} is 0, 1, 2, 3, 4, 5 or 6.

[0603] In other embodiments, k is 0 and 1 is 0 and the antisense strand may be represented by the formula:

[chemical structure]

[0604] When the antisense strand is represented as formula (IIa), each Nₐ′ independently represents an oligonucleotide sequence comprising 2-20, 2-15, or 2-10 modified nucleotides.

[0605] Each of X′, Y′ and Z′ may be the same or different from each other.

[0606] Each nucleotide of the sense strand and antisense strand may be independently modified with LNA, 1,5-anhydrohexitol (HNA), cyclohexenyl (CeNA), 2′-methoxyethyl, 2′-O-methyl, 2′-O-allyl, 2′-C-allyl, 2′-hydroxyl, or 2′-fluoro. For example, each nucleotide of the sense strand and antisense strand is independently modified with 2′-O-methyl or 2′-fluoro. Each X, Y, Z, X′, Y′ and Z′, in particular, may represent a 2′-O-methyl modification or a 2′-fluoro modification.

[0607] In one embodiment, the sense strand of the RNAi agent may contain YYY motif occurring at 9, 10 and 11 positions of the strand when the duplex region is 21 nt, the count starting from the 1st nucleotide from the 5′-end, or optionally, the count starting at the 1st paired nucleotide within the duplex region, from the 5′-end; and Y represents 2′-F modification. The sense strand may additionally contain XXX motif or ZZZ motifs as wing modifications at the opposite end of the duplex region; and XXX and ZZZ each independently represents a 2′-OMe modification or 2′-F modification.

[0608] In one embodiment the antisense strand may contain Y′Y′Y′ motif occurring at positions 11, 12, 13 of the strand, the count starting from the 1st nucleotide from the 5′-end, or optionally, the count starting at the 1st paired nucleotide within the duplex region, from the 5′-end; and Y′ represents 2′-O-methyl modification. The antisense strand may additionally contain X′X′X′ motif or Z′Z′Z′ motifs as wing modifications at the opposite end of the duplex region; and X′X′X′ and Z′Z′Z′ each independently represents a 2′-OMe modification or 2′-F modification.

[0609] The sense strand represented by any one of the above formulas (Ia), (Ib), (Ic), and (Id) forms a duplex with a antisense strand being represented by any one of formulas (IIa), (IIb), (IIc), and (IId), respectively.

[0610] Accordingly, the RNAi agents for use in the methods of the disclosure may comprise a sense strand and an antisense strand, each strand having 14 to 30 nucleotides, the RNAi duplex represented by formula (III):

[chemical structure]

[0611] wherein:
[0612] i, j, k, and I are each independently 0 or 1;
[0613] p. p′, q, and q′ are each independently 0-6;
[0614] each Nₐ and Nₐ independently represents an oligonucleotide sequence comprising 0-25 modified nucleotides, each sequence comprising at least two differently modified nucleotides;
[0615] each N_{b} and N_{b}′ independently represents an oligonucleotide sequence comprising 0-10 modified nucleotides;
[0616] wherein
[0617] each nₚ′, nₚ, nq′, and nq, each of which may or may not be present, independently represents an overhang nucleotide; and
[0618] XXX, YYY, ZZZ, X′X′X′, Y′Y′Y′, and Z′Z′Z′ each independently represent one motif of three identical modifications on three consecutive nucleotides.

[0619] In one embodiment, i is 0 and j is 0; or i is 1 and j is 0; or i is 0 and j is 1; or both i and j are 0; or both i and j are 1. In another embodiment, k is 0 and 1 is 0; or k is 1 and 1 is 0; k is 0 and 1 is 1; or both k and I are 0; or both k and I are 1.

[0620] Exemplary combinations of the sense strand and antisense strand forming an RNAi duplex include the formulas below:

[chemical structure]

[0621] When the RNAi agent is represented by formula (IIIa), each Nₐ independently represents an oligonucleotide sequence comprising 2-20, 2-15, or 2-10 modified nucleotides.

[0622] When the RNAi agent is represented by formula (IIIb), each N_{b} independently represents an oligonucleotide sequence comprising 1-10, 1-7, 1-5 or 1-4 modified nucleotides. Each Nₐ independently represents an oligonucleotide sequence comprising 2-20, 2-15, or 2-10 modified nucleotides.

[0623] When the RNAi agent is represented as formula (IIIc), each No, N_{b}′ independently represents an oligonucleotide sequence comprising 0-10, 0-7, 0-10, 0-7, 0-5, 0-4, 0-2 or Omodified nucleotides. Each Nₐ independently represents an oligonucleotide sequence comprising 2-20, 2-15, or 2-10 modified nucleotides.

[0624] When the RNAi agent is represented as formula (IIId), each No, N_{b}′ independently represents an oligonucleotide sequence comprising 0-10, 0-7, 0-10, 0-7, 0-5, 0-4, 0-2 or 0 modified nucleotides. Each Nₐ, Nₐ′ independently represents an oligonucleotide sequence comprising 2-20, 2-15, or 2-10 modified nucleotides. Each of Nₐ, Nₐ′, N_{b} and N_{b}′ independently comprises modifications of alternating pattern.

[0625] In one embodiment, when the RNAi agent is represented by formula (IIId), the Nₐ modifications are 2′-O-methyl or 2′-fluoro modifications. In another embodiment, when the RNAi agent is represented by formula (IIId), the Nₐ modifications are 2′-O-methyl or 2′-fluoro modifications and nₚ′>0 and at least one nₚ′ is linked to a neighboring nucleotide a via phosphorothioate linkage. In yet another embodiment, when the RNAi agent is represented by formula (IIId), the Nₐ modifications are 2′-O-methyl or 2′-fluoro modifications, nₚ′>0 and at least one nₚ′ is linked to a neighboring nucleotide via phosphorothioate linkage, and the sense strand is conjugated to one or more C16 (or related) moieties attached through a bivalent or trivalent branched linker (described below). In another embodiment, when the RNAi agent is represented by formula (IIId), the Nₐ modifications are 2′-O-methyl or 2′-fluoro modifications, nₚ′>0 and at least one nₚ′ is linked to a neighboring nucleotide via phosphorothioate linkage, the sense strand comprises at least one phosphorothioate linkage, and the sense strand is conjugated to one or more lipophilic, e.g., C16 (or related) moictics, optionally attached through a bivalent or trivalent branched linker.

[0626] In one embodiment, when the RNAi agent is represented by formula (IIIa), the Nₐ modifications are 2′-O-methyl or 2′-fluoro modifications, nₚ′>0 and at least one nₚ′ is linked to a neighboring nucleotide via phosphorothioate linkage, the sense strand comprises at least one phosphorothioate linkage, and the sense strand is conjugated to one or more lipophilic, e.g., C16 (or related) moieties attached through a bivalent or trivalent branched linker.

[0627] In one embodiment, the RNAi agent is a multimer containing at least two duplexes represented by formula (III), (IIIa), (IIIb), (IIIc), and (IIId), wherein the duplexes are connected by a linker. The linker can be cleavable or non-cleavable. Optionally, the multimer further comprises a ligand. Each of the duplexes can target the same gene or two different genes; or each of the duplexes can target same gene at two different target sites.

[0628] In one embodiment, the RNAi agent is a multimer containing three, four, five, six or more duplexes represented by formula (III), (IIIa), (IIIb), (IIIc), and (IIId), wherein the duplexes are connected by a linker. The linker can be cleavable or non-cleavable. Optionally, the multimer further comprises a ligand. Each of the duplexes can target the same gene or two different genes; or each of the duplexes can target same gene at two different target sites.

[0629] In one embodiment, two RNAi agents represented by formula (III), (IIIa), (IIIb), (IIIc), and (IIId) are linked to each other at the 5′ end, and one or both of the 3′ ends and are optionally conjugated to a ligand. Each of the agents can target the same gene or two different genes; or each of the agents can target same gene at two different target sites.

[0630] Various publications describe multimeric RNAi agents that can be used in the methods of the disclosure. Such publications include WO2007/091269, WO2010/141511, WO2007/117686, WO2009/014887, and WO2011/031520; and U.S. Pat. No. 7,858,769, the entire contents of each of which are hereby incorporated herein by reference.

[0631] In certain embodiments, the compositions and methods of the disclosure include a vinyl phosphonate (VP) modification of an RNAi agent as described herein. In exemplary embodiments, a vinyl phosphonate of the disclosure has the following structure:

[chemical structure]

[0632] In exemplary embodiments, a 5′ vinyl phosphonate modified nucleotide of the disclosure has the structure:

[chemical structure]

[0633] wherein X is O or S;
[0634] R is hydrogen, hydroxy, fluoro, or C₁₋₂₀alkoxy (e.g., methoxy or n-hexadecyloxy);
[0635] R⁵′ is ═C(H)—P(O)(OH), and the double bond between the C5′ carbon and R⁵′ is in the E or Z orientation (e.g., E orientation); and
[0636] B is a nucleobase or a modified nucleobase, optionally where B is adenine, guanine, cytosine, thymine, or uracil.

[0637] In one embodiment, R⁵′ is ═C(H)—P(O)(OH), and the double bond between the C5′ carbon and R⁵′ is in the E orientation. In another embodiment, R is methoxy and R⁵′ is ═C(H)—P(O)(OH)2 and the double bond between the C5′ carbon and R⁵′ is in the E orientation. In another embodiment, X is S, R is methoxy, and RS' is ═C(H)—P(O)(OH); and the double bond between the C5′ carbon and R⁵′ is in the E orientation.

[0638] A vinyl phosphonate of the instant disclosure may be attached to either the antisense or the sense strand of a dsRNA of the disclosure. In certain preferred embodiments, a vinyl phosphonate of the instant disclosure is attached to the antisense strand of a dsRNA, optionally at the 5′ end of the antisense strand of the dsRNA.

[0639] Vinyl phosphate modifications are also contemplated for the compositions and methods of the instant disclosure. An exemplary vinyl phosphate structure is:

[chemical structure]

Another exemplary vinyl phosphate structure includes the preceding structure, where R⁵′ is ═C(H)-OP(O)(OH)2 and the double bond between the C5′ carbon and R⁵′ is in the E or Z orientation (e.g., E orientation).
i. Thermally Destabilizing Modifications

[0640] In certain embodiments, a dsRNA molecule can be optimized for RNA interference by incorporating thermally destabilizing modifications in the seed region of the antisense strand (i.e., at positions 2-9 of the 5′-end of the antisense strand) to reduce or inhibit off-target gene silencing. It has been discovered that dsRNAs with an antisense strand comprising at least one thermally destabilizing modification of the duplex within the first 9 nucleotide positions, counting from the 5′ end, of the antisense strand have reduced off-target gene silencing activity. Accordingly, in some embodiments, the antisense strand comprises at least one (e.g., one, two, three, four, five or more) thermally destabilizing modification of the duplex within the first 9 nucleotide positions of the 5′ region of the antisense strand. In some embodiments, one or more thermally destabilizing modification(s) of the duplex is/are located in positions 2-9, or preferably positions 4-8, from the 5′-end of the antisense strand. In some further embodiments, the thermally destabilizing modification(s) of the duplex is/are located at position 6, 7 or 8 from the 5′-end of the antisense strand. In still some further embodiments, the thermally destabilizing modification of the duplex is located at position 7 from the 5′-end of the antisense strand. The term “thermally destabilizing modification(s)” includes modification(s) that would result with a dsRNA with a lower overall melting temperature (Tm) (preferably a Tm with one, two, three or four degrees lower than the Tm of the dsRNA without having such modification(s). In some embodiments, the thermally destabilizing modification of the duplex is located at position 2, 3, 4, 5 or 9 from the 5′-end of the antisense strand.

[0641] The thermally destabilizing modifications can include, but are not limited to, abasic modification; mismatch with the opposing nucleotide in the opposing strand; and sugar modification such as 2′-deoxy modification or acyclic nucleotide, e.g., unlocked nucleic acids (UNA) or glycol nucleic acid (GNA; and 2′-5′-linked ribonucleotides (“3′-RNA”)).

[0642] Exemplified abasic modifications include, but are not limited to the following:

[chemical structure]

### Wherein R═H, Me, Et or OMe; R′═H, Me, Et or OMe; R″═H, Me, Et or OMe

[chemical structure]

wherein B is a modified or unmodified nucleobase.

[0644] Exemplified sugar modifications include, but are not limited to the following:

[chemical structure]

wherein B is a modified or unmodified nucleobase.

[0645] In some embodiments the thermally destabilizing modification of the duplex is selected from the group consisting of:

[chemical structure]

wherein B is a modified or unmodified nucleobase and the asterisk on each structure represents either R, S or racemic.

[0646] In some embodiments the thermally destabilizing modification of the duplex is selected from the group consisting of:

[chemical structure]

wherein B is a modified or unmodified nucleobase and the asterisk represents either R, S or racemic (e.g. S).

[0647] The term “acyclic nucleotide” refers to any nucleotide having an acyclic ribose sugar, for example, where any of bonds between the ribose carbons (e.g., C1′-C2′, C2′-C3′, C3′-C4′, C4′-04′, or C1′-04′) is absent or at least one of ribose carbons or oxygen (e.g., C1′, C2′, C3′, C4′ or 04′) are independently or in combination absent from the nucleotide. In some embodiments, acyclic nucleotide is

[chemical structure]

wherein B is a modified or unmodified nucleobase, R′ and R² independently are H, halogen, OR3, or alkyl; and R³ is H, alkyl, cycloalkyl, aryl, aralkyl, heteroaryl or sugar). The term “UNA” refers to unlocked acyclic nucleic acid, wherein any of the bonds of the sugar has been removed, forming an unlocked “sugar” residue. In one example, UNA also encompasses monomers with bonds between C1′-C4′ being removed (i.e. the covalent carbon-oxygen-carbon bond between the C1′ and C4′ carbons). In another example, the C2′-C3′ bond (i.e. the covalent carbon-carbon bond between the C2′ and C3′ carbons) of the sugar is removed (see Mikhailov et. al., Tetrahedron Letters, 26 (17): 2059 (1985); and Fluiter et al., Mol. Biosyst., 10: 1039 (2009), which are hereby incorporated by reference in their entirety). The acyclic derivative provides greater backbone flexibility without affecting the Watson-Crick pairings. The acyclic nucleotide can be linked via 2′-5′ or 3′-5′ linkage.

[0648] The term ‘GNA’ refers to glycol nucleic acid which is a polymer similar to DNA or RNA but differing in the composition of its “backbone” in that is composed of repeating glycerol units linked by phosphodiester bonds:

[chemical structure]

[0649] The thermally destabilizing modification of the duplex can be mismatches (i.e., noncomplementary base pairs) between the thermally destabilizing nucleotide and the opposing nucleotide in the opposite strand within the dsRNA duplex. Exemplary mismatch base pairs include G:G, G:A, G:U, G:T, A:A, A:C, C:C, C:U, C:T, U:U, T:T, U:T, or a combination thereof. Other mismatch base pairings known in the art are also amenable to the present invention. A mismatch can occur between nucleotides that are either naturally occurring nucleotides or modified nucleotides, i.e., the mismatch base pairing can occur between the nucleobases from respective nucleotides independent of the modifications on the ribose sugars of the nucleotides. In certain embodiments, the dsRNA molecule contains at least one nucleobase in the mismatch pairing that is a 2′-deoxy nucleobase; e.g., the 2′-deoxy nucleobase is in the sense strand.

[0650] In some embodiments, the thermally destabilizing modification of the duplex in the seed region of the antisense strand includes nucleotides with impaired W-C H-bonding to complementary base on the target mRNA, such as:

[chemical structure]

[0651] More examples of abasic nucleotide, acyclic nucleotide modifications (including UNA and GNA), and mismatch modifications have been described in detail in WO 2011/133876, which is herein incorporated by reference in its entirety.

The thermally destabilizing modifications may also include universal base with reduced or abolished capability to form hydrogen bonds with the opposing bases, and phosphate modifications.

[0652] In some embodiments, the thermally destabilizing modification of the duplex includes nucleotides with non-canonical bases such as, but not limited to, nucleobase modifications with impaired or completely abolished capability to form hydrogen bonds with bases in the opposite strand. These nucleobase modifications have been evaluated for destabilization of the central region of the dsRNA duplex as described in WO 2010/0011895, which is herein incorporated by reference in its entirety. Exemplary nucleobase modifications are:

[chemical structure]

[0653] In some embodiments, the thermally destabilizing modification of the duplex in the seed region of the antisense strand includes one or more α-nucleotide complementary to the base on the target mRNA, such as:

[chemical structure]

wherein R is H, OH, OCH₃, F. NH₂, NHMe, NMe2 or O-alkyl.

[0654] Exemplary phosphate modifications known to decrease the thermal stability of dsRNA duplexes compared to natural phosphodiester linkages are:

[chemical structure]

[0655] The alkyl for the R group can be a C₁-C₆alkyl. Specific alkyls for the R group include, but are not limited to methyl, ethyl, propyl, isopropyl, butyl, pentyl and hexyl.

[0656] As the skilled artisan will recognize, in view of the functional role of nucleobases is defining specificity of an RNAi agent of the disclosure, while nucleobase modifications can be performed in the various manners as described herein, e.g., to introduce destabilizing modifications into an RNAi agent of the disclosure, e.g., for purpose of enhancing on-target effect relative to off-target effect, the range of modifications available and, in general, present upon RNAi agents of the disclosure tends to be much greater for non-nucleobase modifications, e.g., modifications to sugar groups or phosphate backbones of polyribonucleotides. Such modifications are described in greater detail in other sections of the instant disclosure and are expressly contemplated for RNAi agents of the disclosure, either possessing native nucleobases or modified nucleobases as described above or elsewhere herein.

[0657] In addition to the antisense strand comprising a thermally destabilizing modification, the dsRNA can also comprise one or more stabilizing modifications. For example, the dsRNA can comprise at least two (e.g., two, three, four, five, six, seven, eight, nine, ten or more) stabilizing modifications. Without limitations, the stabilizing modifications all can be present in one strand. In some embodiments, both the sense and the antisense strands comprise at least two stabilizing modifications. The stabilizing modification can occur on any nucleotide of the sense strand or antisense strand. For instance, the stabilizing modification can occur on every nucleotide on the sense strand or antisense strand; each stabilizing modification can occur in an alternating pattern on the sense strand or antisense strand; or the sense strand or antisense strand comprises both stabilizing modification in an alternating pattern. The alternating pattern of the stabilizing modifications on the sense strand may be the same or different from the antisense strand, and the alternating pattern of the stabilizing modifications on the sense strand can have a shift relative to the alternating pattern of the stabilizing modifications on the antisense strand.

[0658] In some embodiments, the antisense strand comprises at least two (e.g., two, three, four, five, six, seven, eight, nine, ten or more) stabilizing modifications. Without limitations, a stabilizing modification in the antisense strand can be present at any positions. In some embodiments, the antisense comprises stabilizing modifications at positions 2, 6, 8, 9, 14, and 16 from the 5′-end. In some other embodiments, the antisense comprises stabilizing modifications at positions 2, 6, 14, and 16 from the 5′-end. In still some other embodiments, the antisense comprises stabilizing modifications at positions 2, 14, and 16 from the 5′-end.

[0659] In some embodiments, the antisense strand comprises at least one stabilizing modification adjacent to the destabilizing modification. For example, the stabilizing modification can be the nucleotide at the 5′-end or the 3′-end of the destabilizing modification, i.e., at position −1 or +1 from the position of the destabilizing modification. In some embodiments, the antisense strand comprises a stabilizing modification at each of the 5′-end and the 3′-end of the destabilizing modification, i.e., positions −1 and +1 from the position of the destabilizing modification.

[0660] In some embodiments, the antisense strand comprises at least two stabilizing modifications at the 3′-end of the destabilizing modification, i.e., at positions +1 and +2 from the position of the destabilizing modification.

[0661] In some embodiments, the sense strand comprises at least two (e.g., two, three, four, five, six, seven, eight, nine, ten or more) stabilizing modifications. Without limitations, a stabilizing modification in the sense strand can be present at any positions. In some embodiments, the sense strand comprises stabilizing modifications at positions 7, 10, and 11 from the 5′-end. In some other embodiments, the sense strand comprises stabilizing modifications at positions 7, 9, 10, and 11 from the 5′-end. In some embodiments, the sense strand comprises stabilizing modifications at positions opposite or complimentary to positions 11, 12, and 15 of the antisense strand, counting from the 5′-end of the antisense strand. In some other embodiments, the sense strand comprises stabilizing modifications at positions opposite or complimentary to positions 11, 12, 13, and 15 of the antisense strand, counting from the 5′-end of the antisense strand. In some embodiments, the sense strand comprises a block of two, three, or four stabilizing modifications.

[0662] In some embodiments, the sense strand does not comprise a stabilizing modification in position opposite or complimentary to the thermally destabilizing modification of the duplex in the antisense strand.

[0663] Exemplary thermally stabilizing modifications include, but are not limited to, 2′-fluoro modifications. Other thermally stabilizing modifications include, but are not limited to, LNA.

[0664] In some embodiments, the dsRNA of the disclosure comprises at least four (e.g., four, five, six, seven, eight, nine, ten, or more) 2′-fluoro nucleotides. Without limitations, the 2′-fluoro nucleotides all can be present in one strand. In some embodiments, both the sense and the antisense strands comprise at least two 2′-fluoro nucleotides. The 2′-fluoro modification can occur on any nucleotide of the sense strand or antisense strand. For instance, the 2′-fluoro modification can occur on every nucleotide on the sense strand or antisense strand; each 2′-fluoro modification can occur in an alternating pattern on the sense strand or antisense strand; or the sense strand or antisense strand comprises both 2′-fluoro modifications in an alternating pattern. The alternating pattern of the 2′-fluoro modifications on the sense strand may be the same or different from the antisense strand, and the alternating pattern of the 2′-fluoro modifications on the sense strand can have a shift relative to the alternating pattern of the 2′-fluoro modifications on the antisense strand.

[0665] In some embodiments, the antisense strand comprises at least two (e.g., two, three, four, five, six, seven, eight, nine, ten, or more) 2′-fluoro nucleotides. Without limitations, a 2′-fluoro modification in the antisense strand can be present at any positions. In some embodiments, the antisense comprises 2′-fluoro nucleotides at positions 2, 6, 8, 9, 14, and 16 from the 5′-end. In some other embodiments, the antisense comprises 2′-fluoro nucleotides at positions 2, 6, 14, and 16 from the 5′-end. In still some other embodiments, the antisense comprises 2′-fluoro nucleotides at positions 2, 14, and 16 from the 5′-end.

[0666] In some embodiments, the antisense strand comprises at least one 2′-fluoro nucleotide adjacent to the destabilizing modification. For example, the 2′-fluoro nucleotide can be the nucleotide at the 5′-end or the 3′-end of the destabilizing modification, i.e., at position −1 or +1 from the position of the destabilizing modification. In some embodiments, the antisense strand comprises a 2′-fluoro nucleotide at each of the 5′-end and the 3′-end of the destabilizing modification, i.e., positions −1 and +1 from the position of the destabilizing modification.

[0667] In some embodiments, the antisense strand comprises at least two 2′-fluoro nucleotides at the 3′-end of the destabilizing modification, i.e., at positions +1 and +2 from the position of the destabilizing modification.

[0668] In some embodiments, the sense strand comprises at least two (e.g., two, three, four, five, six, seven, eight, nine, ten or more) 2′-fluoro nucleotides. Without limitations, a 2′-fluoro modification in the sense strand can be present at any positions. In some embodiments, the antisense comprises 2′-fluoro nucleotides at positions 7, 10, and 11 from the 5′-end. In some other embodiments, the sense strand comprises 2′-fluoro nucleotides at positions 7, 9, 10, and 11 from the 5′-end. In some embodiments, the sense strand comprises 2′-fluoro nucleotides at positions opposite or complimentary to positions 11, 12, and 15 of the antisense strand, counting from the 5′-end of the antisense strand. In some other embodiments, the sense strand comprises 2′-fluoro nucleotides at positions opposite or complimentary to positions 11, 12, 13, and 15 of the antisense strand, counting from the 5′-end of the antisense strand. In some embodiments, the sense strand comprises a block of two, three or four 2′-fluoro nucleotides.

[0669] In some embodiments, the sense strand does not comprise a 2′-fluoro nucleotide in position opposite or complimentary to the thermally destabilizing modification of the duplex in the antisense strand.

[0670] In some embodiments, the dsRNA molecule of the disclosure comprises a 21 nucleotides (nt) sense strand and a 23 nucleotides (nt) antisense, wherein the antisense strand contains at least one thermally destabilizing nucleotide, where the at least one thermally destabilizing nucleotide occurs in the seed region of the antisense strand (i.e., at position 2-9 of the 5′-end of the antisense strand), wherein one end of the dsRNA is blunt, while the other end is comprises a 2 nt overhang, and wherein the dsRNA optionally further has at least one (e.g., one, two, three, four, five, six or all seven) of the following characteristics: (i) the antisense comprises 2, 3, 4, 5 or 6 2′-fluoro modifications; (ii) the antisense comprises 1, 2, 3, 4 or 5 phosphorothioate internucleotide linkages; (iii) the sense strand is conjugated with a ligand; (iv) the sense strand comprises 2, 3, 4 or 5 2′-fluoro modifications; (v) the sense strand comprises 1, 2, 3, 4 or 5 phosphorothioate internucleotide linkages; (vi) the dsRNA comprises at least four 2′-fluoro modifications; and (vii) the dsRNA comprises a blunt end at 5′-end of the antisense strand. Preferably, the 2 nt overhang is at the 3′-end of the antisense.

[0671] In some embodiments, the dsRNA molecule of the disclosure comprising a sense and antisense strands, wherein: the sense strand is 25-30 nucleotide residues in length, wherein starting from the 5′ terminal nucleotide (position 1), positions 1 to 23 of said sense strand comprise at least 8 ribonucleotides; antisense strand is 36-66 nucleotide residues in length and, starting from the 3′ terminal nucleotide, at least 8 ribonucleotides in the positions paired with positions 1-23 of sense strand to form a duplex; wherein at least the 3′ terminal nucleotide of antisense strand is unpaired with sense strand, and up to 6 consecutive 3′ terminal nucleotides are unpaired with sense strand, thereby forming a 3′ single stranded overhang of 1-6 nucleotides; wherein the 5′ terminus of antisense strand comprises from 10-30 consecutive nucleotides which are unpaired with sense strand, thereby forming a 10-30 nucleotide single stranded 5′ overhang; wherein at least the sense strand 5′ terminal and 3′ terminal nucleotides are base paired with nucleotides of antisense strand when sense and antisense strands are aligned for maximum complementarity, thereby forming a substantially duplexed region between sense and antisense strands; and antisense strand is sufficiently complementary to a target RNA along at least 19 ribonucleotides of antisense strand length to reduce target gene expression when said double stranded nucleic acid is introduced into a mammalian cell; and wherein the antisense strand contains at least one thermally destabilizing nucleotide, where at least one thermally destabilizing nucleotide is in the seed region of the antisense strand (i.e. at position 2-9 of the 5′-end of the antisense strand). For example, the thermally destabilizing nucleotide occurs between positions opposite or complimentary to positions 14-17 of the 5′-end of the sense strand, and wherein the dsRNA optionally further has at least one (e.g., one, two, three, four, five, six or all seven) of the following characteristics: (i) the antisense comprises 2, 3, 4, 5, or 6 2′-fluoro modifications; (ii) the antisense comprises 1, 2. 3, 4, or 5 phosphorothioate internucleotide linkages; (iii) the sense strand is conjugated with a ligand; (iv) the sense strand comprises 2, 3. 4, or 5 2′-fluoro modifications; (v) the sense strand comprises 1, 2. 3, 4, or 5 phosphorothioate internucleotide linkages; and (vi) the dsRNA comprises at least four 2′-fluoro modifications; and (vii) the dsRNA comprises a duplex region of 12-30 nucleotide pairs in length.

[0672] In some embodiments, the dsRNA molecule of the disclosure comprises a sense and antisense strands, wherein said dsRNA molecule comprises a sense strand having a length which is at least 25 and at most 29 nucleotides and an antisense strand having a length which is at most 30 nucleotides with the sense strand comprises a modified nucleotide that is susceptible to enzymatic degradation at position 11 from the 5′ end, wherein the 3′ end of said sense strand and the 5′ end of said antisense strand form a blunt end and said antisense strand is 1˜4 nucleotides longer at its 3′ end than the sense strand, wherein the duplex region which is at least 25 nucleotides in length, and said antisense strand is sufficiently complementary to a target mRNA along at least 19 nt of said antisense strand length to reduce target gene expression when said dsRNA molecule is introduced into a mammalian cell, and wherein dicer cleavage of said dsRNA preferentially results in an siRNA comprising said 3′ end of said antisense strand, thereby reducing expression of the target gene in the mammal, wherein the antisense strand contains at least one thermally destabilizing nucleotide, where the at least one thermally destabilizing nucleotide is in the seed region of the antisense strand (i.e. at position 2-9 of the 5′-end of the antisense strand), and wherein the dsRNA optionally further has at least one (e.g., one, two, three, four, five, six or all seven) of the following characteristics: (i) the antisense comprises 2, 3, 4, 5, or 6 2′-fluoro modifications; (ii) the antisense comprises 1, 2. 3, 4, or 5 phosphorothioate internucleotide linkages; (iii) the sense strand is conjugated with a ligand; (iv) the sense strand comprises 2, 3, 4, or 5 2′-fluoro modifications; (v) the sense strand comprises 1, 2, 3, 4, or 5 phosphorothioate internucleotide linkages; and (vi) the dsRNA comprises at least four 2′-fluoro modifications; and (vii) the dsRNA has a duplex region of 12-29 nucleotide pairs in length.

[0673] In some embodiments, every nucleotide in the sense strand and antisense strand of the dsRNA molecule may be modified. Each nucleotide may be modified with the same or different modification which can include one or more alteration of one or both of the non-linking phosphate oxygens or of one or more of the linking phosphate oxygens; alteration of a constituent of the ribose sugar, e.g., of the 2′ hydroxyl on the ribose sugar; wholesale replacement of the phosphate moiety with “dephospho” linkers; modification or replacement of a naturally occurring base; and replacement or modification of the ribose-phosphate backbone.

[0674] As nucleic acids are polymers of subunits, many of the modifications occur at a position which is repeated within a nucleic acid, e.g., a modification of a base, or a phosphate moiety, or a non-linking O of a phosphate moiety. In some cases, the modification will occur at all of the subject positions in the nucleic acid but in many cases it will not. By way of example, a modification may only occur at a 3′ or 5′ terminal position, may only occur in a terminal region, e.g., at a position on a terminal nucleotide or in the last 2, 3, 4, 5, or 10 nucleotides of a strand. A modification may occur in a double strand region, a single strand region, or in both. A modification may occur only in the double strand region of an RNA or may only occur in a single strand region of an RNA. E.g., a phosphorothioate modification at a non-linking O position may only occur at one or both termini, may only occur in a terminal region, e.g., at a position on a terminal nucleotide or in the last 2, 3, 4, 5, or 10 nucleotides of a strand, or may occur in double strand and single strand regions, particularly at termini. The 5′ end or ends can be phosphorylated.

[0675] It may be possible, e.g., to enhance stability, to include particular bases in overhangs, or to include modified nucleotides or nucleotide surrogates, in single strand overhangs, e.g., in a 5′ or 3′ overhang, or in both. E.g., it can be desirable to include purine nucleotides in overhangs. In some embodiments all or some of the bases in a 3′ or 5′ overhang may be modified, e.g., with a modification described herein. Modifications can include, e.g., the use of modifications at the 2′ position of the ribose sugar with modifications that are known in the art, e.g., the use of deoxyribonucleotides, 2′-deoxy-2′-fluoro (2′-F) or 2′-O-methyl modified instead of the ribosugar of the nucleobase, and modifications in the phosphate group, e.g., phosphorothioate modifications. Overhangs need not be homologous with the target sequence.

[0676] In some embodiments, each residue of the sense strand and antisense strand is independently modified with LNA, HNA, CeNA, 2′-methoxyethyl, 2′-O-methyl, 2′-O-allyl, 2′-C-allyl, 2′-deoxy, or 2′-fluoro. The strands can contain more than one modification. In some embodiments, each residue of the sense strand and antisense strand is independently modified with 2′-O-methyl or 2′-fluoro. It is to be understood that these modifications are in addition to the at least one thermally destabilizing modification of the duplex present in the antisense strand.

[0677] At least two different modifications are typically present on the sense strand and antisense strand. Those two modifications may be the 2′-deoxy. 2′-O-methyl or 2′-fluoro modifications, acyclic nucleotides or others. In some embodiments, the sense strand and antisense strand each comprises two differently modified nucleotides selected from 2′-O-methyl or 2′-deoxy. In some embodiments, each residue of the sense strand and antisense strand is independently modified with 2′-O-methyl nucleotide, 2′-deoxy nucleotide, 2′-deoxy-2′-fluoro nucleotide, 2′-O-N-methylacetamido (2′-O-NMA) nucleotide, a 2′-O-dimethylaminoethoxyethyl (2′-O-DMAEOE) nucleotide, 2′-O-aminopropyl (2′-O-AP) nucleotide, or 2′-ara-F nucleotide. Again, it is to be understood that these modifications are in addition to the at least one thermally destabilizing modification of the duplex present in the antisense strand

[0678] In some embodiments, the dsRNA molecule of the disclosure comprises modifications of an alternating pattern, particular in the B1, B2, B3, B1′, B2′, B3′, B4′ regions. The term “alternating motif” or “alternative pattern” as used herein refers to a motif having one or more modifications, each modification occurring on alternating nucleotides of one strand. The alternating nucleotide may refer to one per every other nucleotide or one per every three nucleotides, or a similar pattern. For example, if A, B and C each represent one type of modification to the nucleotide, the alternating motif can be “ABABABABABAB . . . .” “AABBAABBAABB . . . .” “AABAABAABAAB . . . .” “AAABAAABAAAB . . . .” “AAABBBAAABBB . . . .” or “ABCABCABCABC . . . ,” etc. The type of modifications contained in the alternating motif may be the same or different. For example, if A, B, C, D each represent one type of modification on the nucleotide, the alternating pattern, i.e., modifications on every other nucleotide, may be the same, but each of the sense strand or antisense strand can be selected from several possibilities of modifications within the alternating motif such as “ABABAB . . . “, “ACACAC . . . ” “BDBDBD . . . ” or “CDCDCD . . . .” etc.

[0679] In some embodiments, the dsRNA molecule of the disclosure comprises the modification pattern for the alternating motif on the sense strand relative to the modification pattern for the alternating motif on the antisense strand is shifted. The shift may be such that the modified group of nucleotides of the sense strand corresponds to a differently modified group of nucleotides of the antisense strand and vice versa. For example, the sense strand when paired with the antisense strand in the dsRNA duplex, the alternating motif in the sense strand may start with “ABABAB” from 5′-3′ of the strand and the alternating motif in the antisense strand may start with “BABABA” from 3′-5′ of the strand within the duplex region. As another example, the alternating motif in the sense strand may start with “AABBAABB” from 5′-3′ of the strand and the alternating motif in the antisense strand may start with “BBAABBAA” from 3′-5′ of the strand within the duplex region, so that there is a complete or partial shift of the modification patterns between the sense strand and the antisense strand.

[0680] In one particular example, the alternating motif in the sense strand is “ABABAB” from 5′-3′ of the strand, where each A is an unmodified ribonucleotide and each B is a 2′-Omethyl modified nucleotide.

[0681] In one particular example, the alternating motif in the sense strand is “ABABAB” from 5′-3′ of the strand, where each A is an 2′-deoxy-2′-fluoro modified nucleotide and each B is a 2′-Omethyl modified nucleotide.

[0682] In another particular example, the alternating motif in the antisense strand is “BABABA” from 3′-5′ of the strand, where each A is a 2′-deoxy-2′-fluoro modified nucleotide and each B is a 2′-Omethyl modified nucleotide.

[0683] In one particular example, the alternating motif in the sense strand is “ABABAB” from 5′-3′ of the strand and the alternating motif in the antisense strand is “BABABA” from 3′-5′ of the strand, where each A is an unmodified ribonucleotide and each B is a 2′-Omethyl modified nucleotide.

[0684] In one particular example, the alternating motif in the sense strand is “ABABAB” sfrom 5′-3′ of the strand and the alternating motif in the antisense strand is “BABABA” from 3′-5′ of the strand, where each A is a 2′-deoxy-2′-fluoro modified nucleotide and each B is a 2′-Omethyl modified nucleotide.

[0685] The dsRNA molecule of the disclosure may further comprise at least one phosphorothioate or methylphosphonate internucleotide linkage. The phosphorothioate or methylphosphonate internucleotide linkage modification may occur on any nucleotide of the sense strand or antisense strand or both in any position of the strand. For instance, the internucleotide linkage modification may occur on every nucleotide on the sense strand or antisense strand; each internucleotide linkage modification may occur in an alternating pattern on the sense strand or antisense strand; or the sense strand or antisense strand comprises both internucleotide linkage modifications in an alternating pattern. The alternating pattern of the internucleotide linkage modification on the sense strand may be the same or different from the antisense strand, and the alternating pattern of the internucleotide linkage modification on the sense strand may have a shift relative to the alternating pattern of the internucleotide linkage modification on the antisense strand.

[0686] In some embodiments, the dsRNA molecule comprises the phosphorothioate or methylphosphonate internucleotide linkage modification in the overhang region. For example, the overhang region comprises two nucleotides having a phosphorothioate or methylphosphonate internucleotide linkage between the two nucleotides. Internucleotide linkage modifications also may be made to link the overhang nucleotides with the terminal paired nucleotides within duplex region. For example, at least 2, 3, 4, or all the overhang nucleotides may be linked through phosphorothioate or methylphosphonate internucleotide linkage, and optionally, there may be additional phosphorothioate or methylphosphonate internucleotide linkages linking the overhang nucleotide with a paired nucleotide that is next to the overhang nucleotide. For instance, there may be at least two phosphorothioate internucleotide linkages between the terminal three nucleotides, in which two of the three nucleotides are overhang nucleotides, and the third is a paired nucleotide next to the overhang nucleotide. Preferably, these terminal three nucleotides may be at the 3′-end of the antisense strand.

[0687] In some embodiments, the sense strand of the dsRNA molecule comprises 1-10 blocks of two to ten phosphorothioate or methylphosphonate internucleotide linkages separated by 1, 2, 3, 4, 5, 6, 7, 8, 9, 10, 11, 12, 13, 14, 15, or 16 phosphate internucleotide linkages, wherein one of the phosphorothioate or methylphosphonate internucleotide linkages is placed at any position in the oligonucleotide sequence and the said sense strand is paired with an antisense strand comprising any combination of phosphorothioate, methylphosphonate and phosphate internucleotide linkages or an antisense strand comprising either phosphorothioate or methylphosphonate or phosphate linkage.

[0688] In some embodiments, the antisense strand of the dsRNA molecule comprises two blocks of two phosphorothioate or methylphosphonate internucleotide linkages separated by 1, 2, 3, 4, 5, 6, 7, 8, 9, 10, 11, 12, 13, 14, 15, 16, 17, or 18 phosphate internucleotide linkages, wherein one of the phosphorothioate or methylphosphonate internucleotide linkages is placed at any position in the oligonucleotide sequence and the said antisense strand is paired with a sense strand comprising any combination of phosphorothioate, methylphosphonate and phosphate internucleotide linkages or an antisense strand comprising either phosphorothioate or methylphosphonate or phosphate linkage.

[0689] In some embodiments, the antisense strand of the dsRNA molecule comprises two blocks of three phosphorothioate or methylphosphonate internucleotide linkages separated by 1, 2, 3, 4, 5, 6, 7, 8, 9, 10, 11, 12, 13, 14, 15, or 16 phosphate internucleotide linkages, wherein one of the phosphorothioate or methylphosphonate internucleotide linkages is placed at any position in the oligonucleotide sequence and the said antisense strand is paired with a sense strand comprising any combination of phosphorothioate, methylphosphonate and phosphate internucleotide linkages or an antisense strand comprising either phosphorothioate or methylphosphonate or phosphate linkage.

[0690] In some embodiments, the antisense strand of the dsRNA molecule comprises two blocks of four phosphorothioate or methylphosphonate internucleotide linkages separated by 1, 2, 3, 4, 5, 6, 7, 8, 9, 10, 11, 12, 13, or 14 phosphate internucleotide linkages, wherein one of the phosphorothioate or methylphosphonate internucleotide linkages is placed at any position in the oligonucleotide sequence and the said antisense strand is paired with a sense strand comprising any combination of phosphorothioate, methylphosphonate and phosphate internucleotide linkages or an antisense strand comprising either phosphorothioate or methylphosphonate or phosphate linkage.

[0691] In some embodiments, the antisense strand of the dsRNA molecule comprises two blocks of five phosphorothioate or methylphosphonate internucleotide linkages separated by 1, 2, 3, 4, 5, 6, 7, 8, 9, 10, 11, or 12 phosphate internucleotide linkages, wherein one of the phosphorothioate or methylphosphonate internucleotide linkages is placed at any position in the oligonucleotide sequence and the said antisense strand is paired with a sense strand comprising any combination of phosphorothioate, methylphosphonate and phosphate internucleotide linkages or an antisense strand comprising either phosphorothioate or methylphosphonate or phosphate linkage.

[0692] In some embodiments, the antisense strand of the dsRNA molecule comprises two blocks of six phosphorothioate or methylphosphonate internucleotide linkages separated by 1, 2, 3, 4, 5, 6, 7, 8, 9, or 10 phosphate internucleotide linkages, wherein one of the phosphorothioate or methylphosphonate internucleotide linkages is placed at any position in the oligonucleotide sequence and the said antisense strand is paired with a sense strand comprising any combination of phosphorothioate, methylphosphonate and phosphate internucleotide linkages or an antisense strand comprising either phosphorothioate or methylphosphonate or phosphate linkage.

[0693] In some embodiments, the antisense strand of the dsRNA molecule comprises two blocks of seven phosphorothioate or methylphosphonate internucleotide linkages separated by 1, 2, 3, 4, 5, 6, 7, or 8 phosphate internucleotide linkages, wherein one of the phosphorothioate or methylphosphonate internucleotide linkages is placed at any position in the oligonucleotide sequence and the said antisense strand is paired with a sense strand comprising any combination of phosphorothioate, methylphosphonate and phosphate internucleotide linkages or an antisense strand comprising either phosphorothioate or methylphosphonate or phosphate linkage.

[0694] In some embodiments, the antisense strand of the dsRNA molecule comprises two blocks of eight phosphorothioate or methylphosphonate internucleotide linkages separated by 1, 2, 3, 4, 5, or 6 phosphate internucleotide linkages, wherein one of the phosphorothioate or methylphosphonate internucleotide linkages is placed at any position in the oligonucleotide sequence and the said antisense strand is paired with a sense strand comprising any combination of phosphorothioate, methylphosphonate and phosphate internucleotide linkages or an antisense strand comprising either phosphorothioate or methylphosphonate or phosphate linkage.

[0695] In some embodiments, the antisense strand of the dsRNA molecule comprises two blocks of nine phosphorothioate or methylphosphonate internucleotide linkages separated by 1, 2, 3, or 4 phosphate internucleotide linkages, wherein one of the phosphorothioate or methylphosphonate internucleotide linkages is placed at any position in the oligonucleotide sequence and the said antisense strand is paired with a sense strand comprising any combination of phosphorothioate, methylphosphonate and phosphate internucleotide linkages or an antisense strand comprising either phosphorothioate or methylphosphonate or phosphate linkage.

[0696] In some embodiments, the dsRNA molecule of the disclosure further comprises one or more phosphorothioate or methylphosphonate internucleotide linkage modification within 1-10 of the termini position(s) of the sense or antisense strand. For example, at least 2, 3, 4, 5, 6, 7, 8, 9, or 10 nucleotides may be linked through phosphorothioate or methylphosphonate internucleotide linkage at one end or both ends of the sense or antisense strand.

[0697] In some embodiments, the dsRNA molecule of the disclosure further comprises one or more phosphorothioate or methylphosphonate internucleotide linkage modification within 1-10 of the internal region of the duplex of each of the sense or antisense strand. For example, at least 2, 3, 4, 5, 6, 7, 8, 9, or 10 nucleotides may be linked through phosphorothioate methylphosphonate internucleotide linkage at position 8-16 of the duplex region counting from the 5′-end of the sense strand; the dsRNA molecule can optionally further comprise one or more phosphorothioate or methylphosphonate internucleotide linkage modification within 1-10 of the termini position(s).

[0698] In some embodiments, the dsRNA molecule of the disclosure further comprises one to five phosphorothioate or methylphosphonate internucleotide linkage modification(s) within position 1-5 and one to five phosphorothioate or methylphosphonate internucleotide linkage modification(s) within position 18-23 of the sense strand (counting from the 5′-end), and one to five phosphorothioate or methylphosphonate internucleotide linkage modification at positions 1 and 2 and one to five within positions 18-23 of the antisense strand (counting from the 5′-end).

[0699] In some embodiments, the dsRNA molecule of the disclosure further comprises one phosphorothioate internucleotide linkage modification within position 1-5 and one phosphorothioate or methylphosphonate internucleotide linkage modification within position 18-23 of the sense strand (counting from the 5′-end), and one phosphorothioate internucleotide linkage modification at positions 1 and 2 and two phosphorothioate or methylphosphonate internucleotide linkage modifications within positions 18-23 of the antisense strand (counting from the 5′-end).

[0700] In some embodiments, the dsRNA molecule of the disclosure further comprises two phosphorothioate internucleotide linkage modifications within position 1-5 and one phosphorothioate internucleotide linkage modification within position 18-23 of the sense strand (counting from the 5′-end), and one phosphorothioate internucleotide linkage modification at positions 1 and 2 and two phosphorothioate internucleotide linkage modifications within positions 18-23 of the antisense strand (counting from the 5′-end).

[0701] In some embodiments, the dsRNA molecule of the disclosure further comprises two phosphorothioate internucleotide linkage modifications within position 1-5 and two phosphorothioate internucleotide linkage modifications within position 18-23 of the sense strand (counting from the 5′-end), and one phosphorothioate internucleotide linkage modification at positions 1 and 2 and two phosphorothioate internucleotide linkage modifications within positions 18-23 of the antisense strand (counting from the 5′-end).

[0702] In some embodiments, the dsRNA molecule of the disclosure further comprises two phosphorothioate internucleotide linkage modifications within position 1-5 and two phosphorothioate internucleotide linkage modifications within position 18-23 of the sense strand (counting from the 5′-end), and one phosphorothioate internucleotide linkage modification at positions 1 and 2 and one phosphorothioate internucleotide linkage modification within positions 18-23 of the antisense strand (counting from the 5′-end).

[0703] In some embodiments, the dsRNA molecule of the disclosure further comprises one phosphorothioate internucleotide linkage modification within position 1-5 and one phosphorothioate internucleotide linkage modification within position 18-23 of the sense strand (counting from the 5′-end), and two phosphorothioate internucleotide linkage modifications at positions 1 and 2 and two phosphorothioate internucleotide linkage modifications within positions 18-23 of the antisense strand (counting from the 5′-end).

[0704] In some embodiments, the dsRNA molecule of the disclosure further comprises one phosphorothioate internucleotide linkage modification within position 1-5 and one within position 18-23 of the sense strand (counting from the 5′-end), and two phosphorothioate internucleotide linkage modification at positions 1 and 2 and one phosphorothioate internucleotide linkage modification within positions 18-23 of the antisense strand (counting from the 5′-end).

[0705] In some embodiments, the dsRNA molecule of the disclosure further comprises one phosphorothioate internucleotide linkage modification within position 1-5 (counting from the 5′-end) of the sense strand, and two phosphorothioate internucleotide linkage modifications at positions 1 and 2 and one phosphorothioate internucleotide linkage modification within positions 18-23 of the antisense strand (counting from the 5′-end).

[0706] In some embodiments, the dsRNA molecule of the disclosure further comprises two phosphorothioate internucleotide linkage modifications within position 1-5 (counting from the 5′-end) of the sense strand, and one phosphorothioate internucleotide linkage modification at positions 1 and 2 and two phosphorothioate internucleotide linkage modifications within positions 18-23 of the antisense strand (counting from the 5′-end).

[0707] In some embodiments, the dsRNA molecule of the disclosure further comprises two phosphorothioate internucleotide linkage modifications within position 1-5 and one within position 18-23 of the sense strand (counting from the 5′-end), and two phosphorothioate internucleotide linkage modifications at positions 1 and 2 and one phosphorothioate internucleotide linkage modification within positions 18-23 of the antisense strand (counting from the 5′-end).

[0708] In some embodiments, the dsRNA molecule of the disclosure further comprises two phosphorothioate internucleotide linkage modifications within position 1-5 and one phosphorothioate internucleotide linkage modification within position 18-23 of the sense strand (counting from the 5′-end), and two phosphorothioate internucleotide linkage modifications at positions 1 and 2 and two phosphorothioate internucleotide linkage modifications within positions 18-23 of the antisense strand (counting from the 5′-end).

[0709] In some embodiments, the dsRNA molecule of the disclosure further comprises two phosphorothioate internucleotide linkage modifications within position 1-5 and one phosphorothioate internucleotide linkage modification within position 18-23 of the sense strand (counting from the 5′-end), and one phosphorothioate internucleotide linkage modification at positions 1 and 2 and two phosphorothioate internucleotide linkage modifications within positions 18-23 of the antisense strand (counting from the 5′-end).

[0710] In some embodiments, the dsRNA molecule of the disclosure further comprises two phosphorothioate internucleotide linkage modifications at position 1 and 2, and two phosphorothioate internucleotide linkage modifications at position 20 and 21 of the sense strand (counting from the 5′-end), and one phosphorothioate internucleotide linkage modification at positions 1 and one at position 21 of the antisense strand (counting from the 5′-end).

[0711] In some embodiments, the dsRNA molecule of the disclosure further comprises one phosphorothioate internucleotide linkage modification at position 1, and one phosphorothioate internucleotide linkage modification at position 21 of the sense strand (counting from the 5′-end), and two phosphorothioate internucleotide linkage modifications at positions 1 and 2 and two phosphorothioate internucleotide linkage modifications at positions 20 and 21 the antisense strand (counting from the 5′-end).

[0712] In some embodiments, the dsRNA molecule of the disclosure further comprises two phosphorothioate internucleotide linkage modifications at position 1 and 2, and two phosphorothioate internucleotide linkage modifications at position 21 and 22 of the sense strand (counting from the 5′-end), and one phosphorothioate internucleotide linkage modification at positions 1 and one phosphorothioate internucleotide linkage modification at position 21 of the antisense strand (counting from the 5′-end).

[0713] In some embodiments, the dsRNA molecule of the disclosure further comprises one phosphorothioate internucleotide linkage modification at position 1, and one phosphorothioate internucleotide linkage modification at position 21 of the sense strand (counting from the 5′-end), and two phosphorothioate internucleotide linkage modifications at positions 1 and 2 and two phosphorothioate internucleotide linkage modifications at positions 21 and 22 the antisense strand (counting from the 5′-end).

[0714] In some embodiments, the dsRNA molecule of the disclosure further comprises two phosphorothioate internucleotide linkage modifications at position 1 and 2, and two phosphorothioate internucleotide linkage modifications at position 22 and 23 of the sense strand (counting from the 5′-end), and one phosphorothioate internucleotide linkage modification at positions 1 and one phosphorothioate internucleotide linkage modification at position 21 of the antisense strand (counting from the 5′-end).

[0715] In some embodiments, the dsRNA molecule of the disclosure further comprises one phosphorothioate internucleotide linkage modification at position 1, and one phosphorothioate internucleotide linkage modification at position 21 of the sense strand (counting from the 5′-end), and two phosphorothioate internucleotide linkage modifications at positions 1 and 2 and two phosphorothioate internucleotide linkage modifications at positions 23 and 23 the antisense strand (counting from the 5′-end).

[0716] In some embodiments, compound of the disclosure comprises a pattern of backbone chiral centers. In some embodiments, a common pattern of backbone chiral centers comprises at least 5 internucleotidic linkages in the Sp configuration. In some embodiments, a common pattern of backbone chiral centers comprises at least 6 internucleotidic linkages in the Sp configuration. In some embodiments, a common pattern of backbone chiral centers comprises at least 7 internucleotidic linkages in the Sp configuration. In some embodiments, a common pattern of backbone chiral centers comprises at least 8 internucleotidic linkages in the Sp configuration. In some embodiments, a common pattern of backbone chiral centers comprises at least 9 internucleotidic linkages in the Sp configuration. In some embodiments, a common pattern of backbone chiral centers comprises at least 10 internucleotidic linkages in the Sp configuration. In some embodiments, a common pattern of backbone chiral centers comprises at least 11 internucleotidic linkages in the Sp configuration. In some embodiments, a common pattern of backbone chiral centers comprises at least 12 internucleotidic linkages in the Sp configuration. In some embodiments, a common pattern of backbone chiral centers comprises at least 13 internucleotidic linkages in the Sp configuration. In some embodiments, a common pattern of backbone chiral centers comprises at least 14 internucleotidic linkages in the Sp configuration. In some embodiments, a common pattern of backbone chiral centers comprises at least 15 internucleotidic linkages in the Sp configuration. In some embodiments, a common pattern of backbone chiral centers comprises at least 16 internucleotidic linkages in the Sp configuration. In some embodiments, a common pattern of backbone chiral centers comprises at least 17 internucleotidic linkages in the Sp configuration. In some embodiments, a common pattern of backbone chiral centers comprises at least 18 internucleotidic linkages in the Sp configuration. In some embodiments, a common pattern of backbone chiral centers comprises at least 19 internucleotidic linkages in the Sp configuration. In some embodiments, a common pattern of backbone chiral centers comprises no more than 8 internucleotidic linkages in the Rp configuration. In some embodiments, a common pattern of backbone chiral centers comprises no more than 7 internucleotidic linkages in the Rp configuration. In some embodiments, a common pattern of backbone chiral centers comprises no more than 6 internucleotidic linkages in the Rp configuration. In some embodiments, a common pattern of backbone chiral centers comprises no more than 5 internucleotidic linkages in the Rp configuration. In some embodiments, a common pattern of backbone chiral centers comprises no more than 4 internucleotidic linkages in the Rp configuration. In some embodiments, a common pattern of backbone chiral centers comprises no more than 3 internucleotidic linkages in the Rp configuration. In some embodiments, a common pattern of backbone chiral centers comprises no more than 2 internucleotidic linkages in the Rp configuration. In some embodiments, a common pattern of backbone chiral centers comprises no more than 1 internucleotidic linkages in the Rp configuration. In some embodiments, a common pattern of backbone chiral centers comprises no more than 8 internucleotidic linkages which are not chiral (as a non-limiting example, a phosphodiester). In some embodiments, a common pattern of backbone chiral centers comprises no more than 7 internucleotidic linkages which are not chiral. In some embodiments, a common pattern of backbone chiral centers comprises no more than 6 internucleotidic linkages which are not chiral. In some embodiments, a common pattern of backbone chiral centers comprises no more than 5 internucleotidic linkages which are not chiral. In some embodiments, a common pattern of backbone chiral centers comprises no more than 4 internucleotidic linkages which are not chiral. In some embodiments, a common pattern of backbone chiral centers comprises no more than 3 internucleotidic linkages which are not chiral. In some embodiments, a common pattern of backbone chiral centers comprises no more than 2 internucleotidic linkages which are not chiral. In some embodiments, a common pattern of backbone chiral centers comprises no more than 1 internucleotidic linkages which are not chiral. In some embodiments, a common pattern of backbone chiral centers comprises at least 10 internucleotidic linkages in the Sp configuration, and no more than 8 internucleotidic linkages which are not chiral. In some embodiments, a common pattern of backbone chiral centers comprises at least 11 internucleotidic linkages in the Sp configuration, and no more than 7 internucleotidic linkages which are not chiral. In some embodiments, a common pattern of backbone chiral centers comprises at least 12 internucleotidic linkages in the Sp configuration, and no more than 6 internucleotidic linkages which are not chiral. In some embodiments, a common pattern of backbone chiral centers comprises at least 13 internucleotidic linkages in the Sp configuration, and no more than 6 internucleotidic linkages which are not chiral. In some embodiments, a common pattern of backbone chiral centers comprises at least 14 internucleotidic linkages in the Sp configuration, and no more than 5 internucleotidic linkages which are not chiral. In some embodiments, a common pattern of backbone chiral centers comprises at least 15 internucleotidic linkages in the Sp configuration, and no more than 4 internucleotidic linkages which are not chiral. In some embodiments, the internucleotidic linkages in the Sp configuration are optionally contiguous or not contiguous. In some embodiments, the internucleotidic linkages in the Rp configuration are optionally contiguous or not contiguous. In some embodiments, the internucleotidic linkages which are not chiral are optionally contiguous or not contiguous.

[0717] In some embodiments, compound of the disclosure comprises a block is a stereochemistry block. In some embodiments, a block is an Rp block in that each internucleotidic linkage of the block is Rp. In some embodiments, a 5′-block is an Rp block. In some embodiments, a 3′-block is an Rp block. In some embodiments, a block is an Sp block in that each internucleotidic linkage of the block is Sp. In some embodiments, a 5′-block is an Sp block. In some embodiments, a 3′-block is an Sp block. In some embodiments, provided oligonucleotides comprise both Rp and Sp blocks. In some embodiments, provided oligonucleotides comprise one or more Rp but no Sp blocks. In some embodiments, provided oligonucleotides comprise one or more Sp but no Rp blocks. In some embodiments, provided oligonucleotides comprise one or more PO blocks wherein each internucleotidic linkage in a natural phosphate linkage.

[0718] In some embodiments, compound of the disclosure comprises a 5′-block is an Sp block wherein each sugar moiety comprises a 2′-F modification. In some embodiments, a 5′-block is an Sp block wherein each of internucleotidic linkage is a modified internucleotidic linkage and each sugar moiety comprises a 2′-F modification. In some embodiments, a 5′-block is an Sp block wherein each of internucleotidic linkage is a phosphorothioate linkage and each sugar moiety comprises a 2′-F modification. In some embodiments, a 5′-block comprises 4 or more nucleoside units. In some embodiments, a 5′-block comprises 5 or more nucleoside units. In some embodiments, a 5′-block comprises 6 or more nucleoside units. In some embodiments, a 5′-block comprises 7 or more nucleoside units. In some embodiments, a 3′-block is an Sp block wherein each sugar moiety comprises a 2′-F modification. In some embodiments, a 3′-block is an Sp block wherein each of internucleotidic linkage is a modified internucleotidic linkage and each sugar moiety comprises a 2′-F modification. In some embodiments, a 3′-block is an Sp block wherein each of internucleotidic linkage is a phosphorothioate linkage and each sugar moiety comprises a 2′-F modification. In some embodiments, a 3′-block comprises 4 or more nucleoside units. In some embodiments, a 3′-block comprises 5 or more nucleoside units. In some embodiments, a 3′-block comprises 6 or more nucleoside units. In some embodiments, a 3′-block comprises 7 or more nucleoside units.

[0719] In some embodiments, compound of the disclosure comprises a type of nucleoside in a region or an oligonucleotide is followed by a specific type of internucleotidic linkage, e.g., natural phosphate linkage, modified internucleotidic linkage, Rp chiral internucleotidic linkage, Sp chiral internucleotidic linkage, etc. In some embodiments. A is followed by Sp. In some embodiments. A is followed by Rp. In some embodiments. A is followed by natural phosphate linkage (PO). In some embodiments. U is followed by Sp. In some embodiments. U is followed by Rp. In some embodiments. U is followed by natural phosphate linkage (PO). In some embodiments. C is followed by Sp. In some embodiments. C is followed by Rp. In some embodiments. C is followed by natural phosphate linkage (PO). In some embodiments. G is followed by Sp. In some embodiments, G is followed by Rp. In some embodiments. G is followed by natural phosphate linkage (PO). In some embodiments. C and U are followed by Sp. In some embodiments. C and U are followed by Rp. In some embodiments. C and U are followed by natural phosphate linkage (PO). In some embodiments. A and G are followed by Sp. In some embodiments. A and G are followed by Rp.

[0720] In some embodiments, the antisense strand comprises phosphorothioate internucleotide linkages between nucleotide positions 21 and 22, and between nucleotide positions 22 and 23, wherein the antisense strand contains at least one thermally destabilizing modification of the duplex located in the seed region of the antisense strand (i.e., at position 2-9 of the 5′-end of the antisense strand), and wherein the dsRNA optionally further has at least one (e.g., one, two, three, four, five, six, seven or all eight) of the following characteristics: (i) the antisense comprises 2, 3. 4, 5 or 6 2′-fluoro modifications; (ii) the antisense comprises 3, 4 or 5 phosphorothioate internucleotide linkages; (iii) the sense strand is conjugated with a ligand; (iv) the sense strand comprises 2, 3. 4 or 5 2′-fluoro modifications; (v) the sense strand comprises 1, 2. 3, 4 or 5 phosphorothioate internucleotide linkages; (vi) the dsRNA comprises at least four 2′-fluoro modifications; (vii) the dsRNA comprises a duplex region of 12-40 nucleotide pairs in length; and (viii) the dsRNA has a blunt end at 5′-end of the antisense strand.

[0721] In some embodiments, the antisense strand comprises phosphorothioate internucleotide linkages between nucleotide positions 1 and 2, between nucleotide positions 2 and 3, between nucleotide positions 21 and 22, and between nucleotide positions 22 and 23, wherein the antisense strand contains at least one thermally destabilizing modification of the duplex located in the seed region of the antisense strand (i.e., at position 2-9 of the 5′-end of the antisense strand), and wherein the dsRNA optionally further has at least one (e.g., one, two, three, four, five, six, seven or all eight) of the following characteristics: (i) the antisense comprises 2, 3. 4, 5 or 6 2′-fluoro modifications; (ii) the sense strand is conjugated with a ligand; (iii) the sense strand comprises 2, 3, 4 or 5 2′-fluoro modifications; (iv) the sense strand comprises 1, 2. 3, 4 or 5 phosphorothioate internucleotide linkages; (v) the dsRNA comprises at least four 2′-fluoro modifications; (vi) the dsRNA comprises a duplex region of 12-40 nucleotide pairs in length; (vii) the dsRNA comprises a duplex region of 12-40 nucleotide pairs in length; and (viii) the dsRNA has a blunt end at 5′-end of the antisense strand.

[0722] In some embodiments, the sense strand comprises phosphorothioate internucleotide linkages between nucleotide positions 1 and 2, and between nucleotide positions 2 and 3, wherein the antisense strand contains at least one thermally destabilizing modification of the duplex located in the seed region of the antisense strand (i.e., at position 2-9 of the 5′-end of the antisense strand), and wherein the dsRNA optionally further has at least one (e.g., one, two, three, four, five, six, seven or all eight) of the following characteristics: (i) the antisense comprises 2, 3, 4, 5 or 6 2′-fluoro modifications; (ii) the antisense comprises 1, 2, 3, 4 or 5 phosphorothioate internucleotide linkages; (iii) the sense strand is conjugated with a ligand; (iv) the sense strand comprises 2, 3, 4 or 5 2′-fluoro modifications; (v) the sense strand comprises 3, 4 or 5 phosphorothioate internucleotide linkages; (vi) the dsRNA comprises at least four 2′-fluoro modifications; (vii) the dsRNA comprises a duplex region of 12-40 nucleotide pairs in length; and (viii) the dsRNA has a blunt end at 5′-end of the antisense strand. In some embodiments, the sense strand comprises phosphorothioate internucleotide linkages between nucleotide positions 1 and 2, and between nucleotide positions 2 and 3, the antisense strand comprises phosphorothioate internucleotide linkages between nucleotide positions 1 and 2, between nucleotide positions 2 and 3, between nucleotide positions 21 and 22, and between nucleotide positions 22 and 23, wherein the antisense strand contains at least one thermally destabilizing modification of the duplex located in the seed region of the antisense strand (i.e., at position 2-9 of the 5′-end of the antisense strand), and wherein the dsRNA optionally further has at least one (e.g., one, two, three, four, five, six or all seven) of the following characteristics: (i) the antisense comprises 2, 3, 4, 5 or 6 2′-fluoro modifications; (ii) the sense strand is conjugated with a ligand; (iii) the sense strand comprises 2, 3, 4 or 5 2′-fluoro modifications; (iv) the sense strand comprises 3, 4 or 5 phosphorothioate internucleotide linkages; (v) the dsRNA comprises at least four 2′-fluoro modifications; (vi) the dsRNA comprises a duplex region of 12-40 nucleotide pairs in length; and (vii) the dsRNA has a blunt end at 5′-end of the antisense strand.

[0723] In some embodiments, the dsRNA molecule of the disclosure comprises mismatch(es) with the target, within the duplex, or combinations thereof. The mismatch can occur in the overhang region or the duplex region. The base pair can be ranked on the basis of their propensity to promote dissociation or melting (e.g., on the free energy of association or dissociation of a particular pairing, the simplest approach is to examine the pairs on an individual pair basis, though next neighbor or similar analysis can also be used). In terms of promoting dissociation: A:U is preferred over G:C; G:U is preferred over G:C; and I:C is preferred over G:C (I=inosine). Mismatches, e.g., non-canonical or other than canonical pairings (as described elsewhere herein) are preferred over canonical (A:T, A:U, G:C) pairings; and pairings which include a universal base are preferred over canonical pairings.

[0724] In some embodiments, the dsRNA molecule of the disclosure comprises at least one of the first 1, 2, 3, 4, or 5 base pairs within the duplex regions from the 5′-end of the antisense strand can be chosen independently from the group of: A:U. G:U. I:C, and mismatched pairs, e.g., non-canonical or other than canonical pairings or pairings which include a universal base, to promote the dissociation of the antisense strand at the 5′-end of the duplex.

[0725] In some embodiments, the nucleotide at the 1 position within the duplex region from the 5′-end in the antisense strand is selected from the group consisting of A, dA, dU, U, and dT. Alternatively, at least one of the first 1, 2 or 3 base pair within the duplex region from the 5′-end of the antisense strand is an AU base pair. For example, the first base pair within the duplex region from the 5′-end of the antisense strand is an AU base pair.

[0726] It was found that introducing 4′-modified or 5′-modified nucleotide to the 3′-end of a phosphodiester (PO), phosphorothioate (PS), or phosphorodithioate (PS2) linkage of a dinucleotide at any position of single stranded or double stranded oligonucleotide can exert steric effect to the internucleotide linkage and, hence, protecting or stabilizing it against nucleases.

[0727] In some embodiments, 5′-modified nucleoside is introduced at the 3′-end of a dinucleotide at any position of single stranded or double stranded siRNA. For instance, a 5′-alkylated nucleoside may be introduced at the 3′-end of a dinucleotide at any position of single stranded or double stranded siRNA. The alkyl group at the 5′ position of the ribose sugar can be racemic or chirally pure R or S isomer. An exemplary 5′-alkylated nucleoside is 5′-methyl nucleoside. The 5′-methyl can be either racemic or chirally pure R or S isomer.

[0728] In some embodiments, 4′-modified nucleoside is introduced at the 3′-end of a dinucleotide at any position of single stranded or double stranded siRNA. For instance, a 4′-alkylated nucleoside may be introduced at the 3′-end of a dinucleotide at any position of single stranded or double stranded siRNA. The alkyl group at the 4′ position of the ribose sugar can be racemic or chirally pure R or S isomer. An exemplary 4′-alkylated nucleoside is 4′-methyl nucleoside. The 4′-methyl can be either racemic or chirally pure R or S isomer. Alternatively, a 4′-O-alkylated nucleoside may be introduced at the 3′-end of a dinucleotide at any position of single stranded or double stranded siRNA. The 4′-O-alkyl of the ribose sugar can be racemic or chirally pure R or S isomer. An exemplary 4′-O-alkylated nucleoside is 4′-O-methyl nucleoside. The 4′-O-methyl can be either racemic or chirally pure R or S isomer.

[0729] In some embodiments, 5′-alkylated nucleoside is introduced at any position on the sense strand or antisense strand of a dsRNA, and such modification maintains or improves potency of the dsRNA. The 5′-alkyl can be either racemic or chirally pure R or S isomer. An exemplary 5′-alkylated nucleoside is 5′-methyl nucleoside. The 5′-methyl can be either racemic or chirally pure R or Sisomer. In some embodiments, 4′-alkylated nucleoside is introduced at any position on the sense strand or antisense strand of a dsRNA, and such modification maintains or improves potency of the dsRNA. The 4′-alkyl can be either racemic or chirally pure R or S isomer. An exemplary 4′-alkylated nucleoside is 4′-methyl nucleoside. The 4′-methyl can be either racemic or chirally pure R or S isomer.

[0730] In some embodiments, 4′-O-alkylated nucleoside is introduced at any position on the sense strand or antisense strand of a dsRNA, and such modification maintains or improves potency of the dsRNA. The 5′-alkyl can be either racemic or chirally pure R or S isomer. An exemplary 4′-O-alkylated nucleoside is 4′-O-methyl nucleoside. The 4′-O-methyl can be either racemic or chirally pure R or Sisomer.

[0731] In some embodiments, the dsRNA molecule of the disclosure can comprise 2′-5′ linkages (with 2′-H, 2′-OH and 2′-OMe and with P═O or P═S). For example, the 2′-5′ linkages modifications can be used to promote nuclease resistance or to inhibit binding of the sense to the antisense strand, or can be used at the 5′ end of the sense strand to avoid sense strand activation by RISC.

[0732] In another embodiment, the dsRNA molecule of the disclosure can comprise L sugars (e.g., L ribose, L-arabinose with 2′-H, 2′-OH and 2′-OMe). For example, these L sugars modifications can be used to promote nuclease resistance or to inhibit binding of the sense to the antisense strand, or can be used at the 5′ end of the sense strand to avoid sense strand activation by RISC.

[0733] Various publications describe multimeric siRNA which can all be used with the dsRNA of the disclosure. Such publications include WO2007/091269, U.S. Pat. No. 7,858,769, WO2010/141511. WO2007/117686, WO2009/014887, and WO2011/031520 which are hereby incorporated by their entirely.

[0734] As described in more detail below, the RNAi agent that contains conjugations of one or more carbohydrate moieties to an RNAi agent can optimize one or more properties of the RNAi agent. In many cases, the carbohydrate moiety will be attached to a modified subunit of the RNAi agent. For example, the ribose sugar of one or more ribonucleotide subunits of a dsRNA agent can be replaced with another moiety, e.g., a non-carbohydrate (preferably cyclic) carrier to which is attached a carbohydrate ligand. A ribonucleotide subunit in which the ribose sugar of the subunit has been so replaced is referred to herein as a ribose replacement modification subunit (RRMS). A cyclic carrier may be a carbocyclic ring system, i.e., all ring atoms are carbon atoms, or a heterocyclic ring system, i.e., one or more ring atoms may be a heteroatom, e.g., nitrogen, oxygen, sulfur. The cyclic carrier may be a monocyclic ring system, or may contain two or more rings, e.g. fused rings. The cyclic carrier may be a fully saturated ring system, or it may contain one or more double bonds. The ligand may be attached to the polynucleotide via a carrier. The carriers include (i) at least one “backbone attachment point.” preferably two “backbone attachment points” and (ii) at least one “tethering attachment point.” A “backbone attachment point” as used herein refers to a functional group, e.g. a hydroxyl group, or generally, a bond available for, and that is suitable for incorporation of the carrier into the backbone, e.g., the phosphate, or modified phosphate, e.g., sulfur containing, backbone, of a ribonucleic acid. A “tethering attachment point” (TAP) in some embodiments refers to a constituent ring atom of the cyclic carrier, e.g., a carbon atom or a heteroatom (distinct from an atom which provides a backbone attachment point), that connects a selected moiety. The moiety can be. e.g., a carbohydrate, e.g. monosaccharide, disaccharide, trisaccharide, tetrasaccharide, oligosaccharide and polysaccharide. Optionally, the selected moiety is connected by an intervening tether to the cyclic carrier. Thus, the cyclic carrier will often include a functional group, e.g., an amino group, or generally, provide a bond, that is suitable for incorporation or tethering of another chemical entity, e.g., a ligand to the constituent ring.

[0735] The RNAi agents may be conjugated to a ligand via a carrier, wherein the carrier can be cyclic group or acyclic group; preferably, the cyclic group is selected from pyrrolidinyl, pyrazolinyl, pyrazolidinyl, imidazolinyl, imidazolidinyl, piperidinyl, piperazinyl, [1,3]dioxolane, oxazolidinyl, isoxazolidinyl, morpholinyl, thiazolidinyl, isothiazolidinyl, quinoxalinyl, pyridazinonyl, tetrahydrofuryl and decalin; preferably, the acyclic group is selected from serinol backbone or diethanolamine backbone.

[0736] In certain specific embodiments, the RNAi agent for use in the methods of the disclosure is an agent selected from the group of agents listed in any one of Tables 2, 3, 5, 6, 8, 9, 10A, 10B, 10C, 10D, 11, and 12. These agents may further comprise a ligand.

IV. iRNAs Conjugated to Ligands

[0737] Another modification of the RNA of an iRNA of the invention involves chemically linking to the iRNA one or more ligands, moieties or conjugates that enhance the activity, cellular distribution or cellular uptake of the iRNA, e.g., into a cell. Such moieties include but are not limited to lipid moieties such as a cholesterol moiety (Letsinger et al., Proc. Natl. Acid. Sci. USA, 1989, 86: 6553-6556), cholic acid (Manoharan et al., Biorg. Med. Chem. Let., 1994, 4:1053-1060), a thiocther, e.g., beryl-S-tritylthiol (Manoharan et al., Ann. N.Y. Acad. Sci., 1992, 660:306-309; Manoharan et al., Biorg. Med. Chem. Let., 1993, 3:2765-2770), a thiocholesterol (Oberhauser et al., Nucl. Acids Res., 1992, 20:533-538), an aliphatic chain, e.g., dodecandiol or undecyl residues (Saison-Behmoaras et al., EMBO J. 1991, 10:1111-1118; Kabanov et al., FEBS Lett., 1990, 259:327-330; Svinarchuk et al., Biochimie, 1993, 75:49-54), a phospholipid, e.g., di-hexadecyl-rac-glycerol or triethyl-ammonium 1,2-di-O-hexadecyl-rac-glycero-3-phosphonate (Manoharan et al., Tetrahedron Lett., 1995, 36:3651-3654; Shea et al., Nucl. Acids Res., 1990, 18:3777-3783), a polyamine or a polyethylene glycol chain (Manoharan et al., Nucleosides & Nucleotides, 1995, 14:969-973), or adamantane acetic acid (Manoharan et al., Tetrahedron Lett., 1995, 36:3651-3654), a palmityl moiety (Mishra et al., Biochim. Biophys. Acta, 1995, 1264:229-237), or an octadecylamine or hexylamino-carbonyloxycholesterol moiety (Crooke et al., J. Pharmacol. Exp. Ther., 1996, 277:923-937).

[0738] In certain embodiments, a ligand alters the distribution, targeting or lifetime of an iRNA agent into which it is incorporated. In some embodiments, a ligand provides an enhanced affinity for a selected target, e.g., molecule, cell or cell type, compartment, e.g., a cellular or organ compartment, tissue, organ or region of the body, as, e.g., compared to a species absent such a ligand. Typical ligands will not take part in duplex pairing in a duplexed nucleic acid.

[0739] Ligands can include a naturally occurring substance, such as a protein (e.g., human serum albumin (HSA), low-density lipoprotein (LDL), or globulin); carbohydrate (e.g., a dextran, pullulan, chitin, chitosan, inulin, cyclodextrin or hyaluronic acid); or a lipid. The ligand may also be a recombinant or synthetic molecule, such as a synthetic polymer, e.g., a synthetic polyamino acid. Examples of polyamino acids include polyamino acid is a polylysine (PLL), poly L-aspartic acid, poly L-glutamic acid, styrene-maleic acid anhydride copolymer, poly(L-lactide-co-glycolied) copolymer, divinyl ether-maleic anhydride copolymer, N-(2-hydroxypropyl)methacrylamide copolymer (HMPA), polyethylene glycol (PEG), polyvinyl alcohol (PVA), polyurethane, poly(2-ethylacryllic acid), N-isopropylacrylamide polymers, or polyphosphazine. Example of polyamines include; polyethylenimine, polylysine (PLL), spermine, spermidine, polyamine, pseudopeptide-polyamine, peptidomimetic polyamine, dendrimer polyamine, arginine, amidine, protamine, cationic lipid, cationic porphyrin, quaternary salt of a polyamine, or an a helical peptide.

[0740] Ligands can also include targeting groups, e.g., a cell or tissue targeting agent, e.g., a lectin, glycoprotein, lipid or protein, e.g., an antibody, that binds to a specified cell type such as a kidney cell. A targeting group can be a thyrotropin, melanotropin, lectin, glycoprotein, surfactant protein A, Mucin carbohydrate, multivalent lactose, multivalent galactose, N-acetyl-galactosamine, N-acetyl-glucosamine multivalent mannose, multivalent fucose, glycosylated polyaminoacids, multivalent galactose, transferrin, bisphosphonate, polyglutamate, polyaspartate, a lipid, cholesterol, a steroid, bile acid, folate, vitamin B12, biotin, or an RGD peptide or RGD peptide mimetic. In certain embodiments, the ligand is a multivalent galactose, e.g., an N-acetyl-galactosamine.

[0741] Other examples of ligands include dyes, intercalating agents (e.g. acridines), cross-linkers (e.g. psoralene, mitomycin C), porphyrins (TPPC4, texaphyrin, Sapphyrin), polycyclic aromatic hydrocarbons (e.g., phenazine, dihydrophenazine), artificial endonucleases (e.g. EDTA), lipophilic molecules, e.g., cholesterol, cholic acid, adamantane acetic acid, 1-pyrene butyric acid, dihydrotestosterone. 1.3-Bis-O(hexadecyl)glycerol, geranyloxyhexyl group, hexadecylglycerol, borneol, menthol, 1.3-propanediol, heptadecyl group, palmitic acid, myristic acid, O3-(oleoyl)lithocholic acid, O3-(oleoyl)cholenic acid, dimethoxytrityl, or phenoxazine)and peptide conjugates (e.g., antennapedia peptide, Tat peptide), alkylating agents, phosphate, amino, mercapto, PEG (e.g., PEG-40K), MPEG, [MPEG]2, polyamino, alkyl, substituted alkyl, radiolabeled markers, enzymes, haptens (e.g. biotin), transport/absorption facilitators (e.g., aspirin, vitamin E, folic acid), synthetic ribonucleases (e.g., imidazole, bisimidazole, histamine, imidazole clusters, acridine-imidazole conjugates, Eu3+ complexes of tetraazamacrocycles), dinitrophenyl, HRP, or AP.

[0742] Ligands can be proteins, e.g., glycoproteins, or peptides, e.g., molecules having a specific affinity for a co-ligand, or antibodies e.g., an antibody, that binds to a specified cell type such as a cancer cell, endothelial cell, or bone cell. Ligands may also include hormones and hormone receptors. They can also include non-peptidic species, such as lipids, lectins, carbohydrates, vitamins, cofactors, multivalent lactose, multivalent galactose, N-acetyl-galactosamine, N-acetyl-glucosamine multivalent mannose, or multivalent fucose. The ligand can be, for example, a lipopolysaccharide, an activator of p38 MAP kinase, or an activator of NF-κB.

[0743] The ligand can be a substance, e.g., a drug, which can increase the uptake of the iRNA agent into the cell, for example, by disrupting the cell's cytoskeleton, e.g., by disrupting the cell's microtubules, microfilaments, or intermediate filaments. The drug can be, for example, taxon, vincristine, vinblastine, cytochalasin, nocodazole, japlakinolide, latrunculin A, phalloidin, swinholide A, indanocine, or myoservin.

[0744] In some embodiments, a ligand attached to an iRNA as described herein acts as a pharmacokinetic modulator (PK modulator). PK modulators include lipophiles, bile acids, steroids, phospholipid analogues, peptides, protein binding agents, PEG, vitamins etc. Exemplary PK modulators include, but are not limited to, cholesterol, fatty acids, cholic acid, lithocholic acid, dialkylglycerides, diacylglyceride, phospholipids, sphingolipids, naproxen, ibuprofen, vitamin E, biotin etc. Oligonucleotides that comprise a number of phosphorothioate linkages are also known to bind to serum protein, thus short oligonucleotides, e.g., oligonucleotides of about 5 bases, 10 bases, 15 bases or 20 bases, comprising multiple of phosphorothioate linkages in the backbone are also amenable to the present invention as ligands (e.g. as PK modulating ligands). In addition, aptamers that bind serum components (e.g. serum proteins) are also suitable for use as PK modulating ligands in the embodiments described herein.

[0745] Ligand-conjugated iRNAs of the invention may be synthesized by the use of an oligonucleotide that bears a pendant reactive functionality, such as that derived from the attachment of a linking molecule onto the oligonucleotide (described below). This reactive oligonucleotide may be reacted directly with commercially-available ligands, ligands that are synthesized bearing any of a variety of protecting groups, or ligands that have a linking moiety attached thereto.

[0746] The oligonucleotides used in the conjugates of the present invention may be conveniently and routinely made through the well-known technique of solid-phase synthesis. Equipment for such synthesis is sold by several vendors including, for example, Applied Biosystems® (Foster City, Calif.). Any other means for such synthesis known in the art may additionally or alternatively be employed. It is also known to use similar techniques to prepare other oligonucleotides, such as the phosphorothioates and alkylated derivatives.

[0747] In the ligand-conjugated oligonucleotides and ligand-molecule bearing sequence-specific linked nucleosides of the present invention, the oligonucleotides and oligonucleosides may be assembled on a suitable DNA synthesizer utilizing standard nucleotide or nucleoside precursors, or nucleotide or nucleoside conjugate precursors that already bear the linking moiety, ligand-nucleotide or nucleoside-conjugate precursors that already bear the ligand molecule, or non-nucleoside ligand-bearing building blocks.

[0748] When using nucleotide-conjugate precursors that already bear a linking moiety, the synthesis of the sequence-specific linked nucleosides is typically completed, and the ligand molecule is then reacted with the linking moiety to form the ligand-conjugated oligonucleotide. In some embodiments, the oligonucleotides or linked nucleosides of the present invention are synthesized by an automated synthesizer using phosphoramidites derived from ligand-nucleoside conjugates in addition to the standard phosphoramidites and non-standard phosphoramidites that are commercially available and routinely used in oligonucleotide synthesis.

### A. Lipid Conjugates

[0749] In certain embodiments, the ligand or conjugate is a lipid or lipid-based molecule. Such a lipid or lipid-based molecule can typically bind a serum protein, such as human serum albumin (HSA). An HSA binding ligand allows for distribution of the conjugate to a target tissue, e.g., a non-kidney target tissue of the body. For example, the target tissue can be the liver, including parenchymal cells of the liver. Other molecules that can bind HSA can also be used as ligands. For example, naproxen or aspirin can be used. A lipid or lipid-based ligand can (a) increase resistance to degradation of the conjugate, (b) increase targeting or transport into a target cell or cell membrane, or (c) can be used to adjust binding to a serum protein, e.g., HSA.

[0750] A lipid-based ligand can be used to modulate, e.g., control (e.g., inhibit) the binding of the conjugate to a target tissue. For example, a lipid or lipid-based ligand that binds to HSA more strongly will be less likely to be targeted to the kidney and therefore less likely to be cleared from the body. A lipid or lipid-based ligand that binds to HSA less strongly can be used to target the conjugate to the kidney.

[0751] In certain embodiments, the lipid-based ligand binds HSA. For example, the ligand can bind HSA with a sufficient affinity such that distribution of the conjugate to a non-kidney tissue is enhanced. However, the affinity is typically not so strong that the HSA-ligand binding cannot be reversed.

[0752] In certain embodiments, the lipid-based ligand binds HSA weakly or not at all, such that distribution of the conjugate to the kidney is enhanced. Other moieties that target to kidney cells can also be used in place of or in addition to the lipid-based ligand.

[0753] In another aspect, the ligand is a moiety, e.g., a vitamin, which is taken up by a target cell, e.g., a proliferating cell. These are particularly useful for treating disorders characterized by unwanted cell proliferation, e.g., of the malignant or non-malignant type, e.g., cancer cells. Exemplary vitamins include vitamin A, E, and K. Other exemplary vitamins include are B vitamin, e.g., folic acid, B12, riboflavin, biotin, pyridoxal or other vitamins or nutrients taken up by cancer cells. Also included are HSA and low density lipoprotein (LDL).

### B. Cell Permeation Agents

[0754] In another aspect, the ligand is a cell-permeation agent, such as a helical cell-permeation agent. In certain embodiments, the agent is amphipathic. An exemplary agent is a peptide such as tat or antennopedia. If the agent is a peptide, it can be modified, including a peptidylmimetic, invertomers, non-peptide or pseudo-peptide linkages, and use of D-amino acids. The helical agent is typically an α-helical agent and can have a lipophilic and a lipophobic phase.

[0755] The ligand can be a peptide or peptidomimetic. A peptidomimetic (also referred to herein as an oligopeptidomimetic) is a molecule capable of folding into a defined three-dimensional structure similar to a natural peptide. The attachment of peptide and peptidomimetics to iRNA agents can affect pharmacokinetic distribution of the iRNA, such as by enhancing cellular recognition and absorption. The peptide or peptidomimetic moiety can be about 5-50 amino acids long, e.g., about 5, 10, 15, 20, 25, 30, 35, 40, 45, or 50 amino acids long.

[0756] A peptide or peptidomimetic can be, for example, a cell permeation peptide, cationic peptide, amphipathic peptide, or hydrophobic peptide (e.g., consisting primarily of Tyr, Trp, or Phe). The peptide moiety can be a dendrimer peptide, constrained peptide or crosslinked peptide. In another alternative, the peptide moiety can include a hydrophobic membrane translocation sequence (MTS). An exemplary hydrophobic MTS-containing peptide is RFGF having the amino acid sequence AAVALLPAVLLALLAP (SEQ ID NO: 104). An RFGF analogue (e.g., amino acid sequence AALLPVLLAAP (SEQ ID NO: 105)) containing a hydrophobic MTS can also be a targeting moiety. The peptide moiety can be a “delivery” peptide, which can carry large polar molecules including peptides, oligonucleotides, and protein across cell membranes. For example, sequences from the HIV Tat protein (GRKKRRQRRRPPQ (SEQ ID NO: 106)) and the Drosophila Antennapedia protein (RQIKIWFQNRRMKWKK (SEQ ID NO: 107)) have been found to be capable of functioning as delivery peptides. A peptide or peptidomimetic can be encoded by a random sequence of DNA, such as a peptide identified from a phage-display library, or one-bead-one-compound (OBOC) combinatorial library (Lam et al., Nature, 354:82-84, 1991). Typically, the peptide or peptidomimetic tethered to a dsRNA agent via an incorporated monomer unit is a cell targeting peptide such as an arginine-glycine-aspartic acid (RGD)-peptide, or RGD mimic. A peptide moiety can range in length from about 5 amino acids to about 40 amino acids. The peptide moieties can have a structural modification, such as to increase stability or direct conformational properties. Any of the structural modifications described below can be utilized.

[0757] An RGD peptide for use in the compositions and methods of the invention may be linear or cyclic, and may be modified, e.g., glycosylated or methylated, to facilitate targeting to a specific tissue(s). RGD-containing peptides and peptidiomimemtics may include D-amino acids, as well as synthetic RGD mimics. In addition to RGD, one can use other moieties that target the integrin ligand. Preferred conjugates of this ligand target PECAM-1 or VEGF.

[0758] An RGD peptide moiety can be used to target a particular cell type, e.g., a tumor cell, such as an endothelial tumor cell or a breast cancer tumor cell (Zitzmann et al., Cancer Res., 62:5139-43, 2002). An RGD peptide can facilitate targeting of an dsRNA agent to tumors of a variety of other tissues, including the lung, kidney, spleen, or liver (Aoki et al., Cancer Gene Therapy 8:783-787, 2001). Typically, the RGD peptide will facilitate targeting of an iRNA agent to the kidney. The RGD peptide can be linear or cyclic, and can be modified, e.g., glycosylated or methylated to facilitate targeting to specific tissues. For example, a glycosylated RGD peptide can deliver an iRNA agent to a tumor cell expressing avß; (Haubner et al., Jour. Nucl. Med., 42:326-336, 2001).

[0759] A “cell permeation peptide” is capable of permeating a cell, e.g., a microbial cell, such as a bacterial or fungal cell, or a mammalian cell, such as a human cell. A microbial cell-permeating peptide can be, for example, an α-helical linear peptide (e.g., LL-37 or Ceropin P1), a disulfide bond-containing peptide (e.g., α-defensin, β-defensin or bactenecin), or a peptide containing only one or two dominating amino acids (e.g., PR-39 or indolicidin). A cell permeation peptide can also include a nuclear localization signal (NLS). For example, a cell permeation peptide can be a bipartite amphipathic peptide, such as MPG, which is derived from the fusion peptide domain of HIV-1 gp41 and the NLS of SV40 large T antigen (Simconi et al., Nucl. Acids Res. 31:2717-2724, 2003).

### C. Carbohydrate Conjugates

[0760] In some embodiments of the compositions and methods of the invention, an iRNA further comprises a carbohydrate. The carbohydrate conjugated iRNA are advantageous for the in vivo delivery of nucleic acids, as well as compositions suitable for in vivo therapeutic use, as described herein. As used herein, “carbohydrate” refers to a compound which is either a carbohydrate per se made up of one or more monosaccharide units having at least 6 carbon atoms (which can be linear, branched or cyclic) with an oxygen, nitrogen or sulfur atom bonded to each carbon atom; or a compound having as a part thereof a carbohydrate moiety made up of one or more monosaccharide units each having at least six carbon atoms (which can be linear, branched or cyclic), with an oxygen, nitrogen or sulfur atom bonded to each carbon atom. Representative carbohydrates include the sugars (mono-, di-, tri- and oligosaccharides containing from about 4, 5, 6, 7, 8, or 9 monosaccharide units), and polysaccharides such as starches, glycogen, cellulose and polysaccharide gums. Specific monosaccharides include C5 and above (e.g., C5, C6, C7, or C8) sugars; di- and tri-saccharides include sugars having two or three monosaccharide units (e.g., C5, C6, C7, or C8).

[0761] In certain embodiments, a carbohydrate conjugate comprises a monosaccharide.

[0762] In certain embodiments, the monosaccharide is an N-acetylgalactosamine (GalNAc). GalNAc conjugates, which comprise one or more N-acetylgalactosamine (GalNAc) derivatives, are described, for example, in U.S. Pat. No. 8,106,022, the entire content of which is hereby incorporated herein by reference. In some embodiments, the GalNAc conjugate serves as a ligand that targets the iRNA to particular cells. In some embodiments, the GalNAc conjugate targets the iRNA to liver cells, e.g., by serving as a ligand for the asialoglycoprotein receptor of liver cells (e.g., hepatocytes).

[0763] In some embodiments, the carbohydrate conjugate comprises one or more GalNAc derivatives. The GalNAc derivatives may be attached via a linker, e.g., a bivalent or trivalent branched linker. In some embodiments the GalNAc conjugate is conjugated to the 3′ end of the sense strand. In some embodiments, the GalNAc conjugate is conjugated to the iRNA agent (e.g., to the 3′ end of the sense strand) via a linker, e.g., a linker as described herein. In some embodiments the GalNAc conjugate is conjugated to the 5′ end of the sense strand. In some embodiments, the GalNAc conjugate is conjugated to the iRNA agent (e.g., to the 5′ end of the sense strand) via a linker, e.g., a linker as described herein.

[0764] In certain embodiments of the invention, the GalNAc or GalNAc derivative is attached to an iRNA agent of the invention via a monovalent linker. In some embodiments, the GalNAc or GalNAc derivative is attached to an iRNA agent of the invention via a bivalent linker. In yet other embodiments of the invention, the GalNAc or GalNAc derivative is attached to an iRNA agent of the invention via a trivalent linker. In other embodiments of the invention, the GalNAc or GalNAc derivative is attached to an iRNA agent of the invention via a tetravalent linker.

[0765] In certain embodiments, the double stranded RNAi agents of the invention comprise one GalNAc or GalNAc derivative attached to the iRNA agent. In certain embodiments, the double stranded RNAi agents of the invention comprise a plurality (e.g., 2, 3, 4, 5, or 6) GalNAc or GalNAc derivatives, each independently attached to a plurality of nucleotides of the double stranded RNAi agent through a plurality of monovalent linkers.

[0766] In some embodiments, for example, when the two strands of an iRNA agent of the invention are part of one larger molecule connected by an uninterrupted chain of nucleotides between the 3′-end of one strand and the 5′-end of the respective other strand forming a hairpin loop comprising, a plurality of unpaired nucleotides, each unpaired nucleotide within the hairpin loop may independently comprise a GalNAc or GalNAc derivative attached via a monovalent linker. The hairpin loop may also be formed by an extended overhang in one strand of the duplex.

[0767] In some embodiments, for example, when the two strands of an iRNA agent of the invention are part of one larger molecule connected by an uninterrupted chain of nucleotides between the 3′-end of one strand and the 5′-end of the respective other strand forming a hairpin loop comprising, a plurality of unpaired nucleotides, each unpaired nucleotide within the hairpin loop may independently comprise a GalNAc or GalNAc derivative attached via a monovalent linker. The hairpin loop may also be formed by an extended overhang in one strand of the duplex.

[0768] In some embodiments, the GalNAc conjugate is

[chemical structure]

[0769] In some embodiments, the RNAi agent is attached to the carbohydrate conjugate via a linker as shown in the following schematic, wherein X is O or S

[chemical structure]

[0770] In some embodiments, the RNAi agent is conjugated to L96 as defined in Table 1 and shown below:

[chemical structure]

[0771] In certain embodiments, a carbohydrate conjugate for use in the compositions and methods of the invention is selected from the group consisting of:

[chemical structure]

[chemical structure]

[chemical structure]

[chemical structure]

[chemical structure]

wherein Y is O or S and n is 3-6 (Formula XXV);

[chemical structure]

wherein X is O or S (Formula XXVII);

[chemical structure]

[0772] In certain embodiments, a carbohydrate conjugate for use in the compositions and methods of the invention is a monosaccharide. In certain embodiments, the monosaccharide is an N-acetylgalactosamine, such as

[chemical structure]

[0773] Another representative carbohydrate conjugate for use in the embodiments described herein includes, but is not limited to.

[chemical structure]

[0774] when one of X or Y is an oligonucleotide, the other is a hydrogen.

[0775] In some embodiments, a suitable ligand is a ligand disclosed in WO 2019/055633, the entire contents of which are incorporated herein by reference. In one embodiment the ligand comprises the structure below:

[chemical structure]

[0776] In certain embodiments, the RNAi agents of the disclosure may include GalNAc ligands, even if such GalNAc ligands are currently projected to be of limited value for the preferred intrathecal/CNS delivery route(s) of the instant disclosure.

[0777] In certain embodiments of the invention, the GalNAc or GalNAc derivative is attached to an iRNA agent of the invention via a monovalent linker. In some embodiments, the GalNAc or GalNAc derivative is attached to an iRNA agent of the invention via a bivalent linker. In yet other embodiments of the invention, the GalNAc or GalNAc derivative is attached to an iRNA agent of the invention via a trivalent linker.

[0778] In one embodiment, the double stranded RNAi agents of the invention comprise one or more GalNAc or GalNAc derivative attached to the iRNA agent. The GalNAc may be attached to any nucleotide via a linker on the sense strand or antsisense strand. The GalNac may be attached to the 5′-end of the sense strand, the 3′ end of the sense strand, the 5′-end of the antisense strand, or the 3′-end of the antisense strand. In one embodiment, the GalNAc is attached to the 3′ end of the sense strand, e.g., via a trivalent linker.

[0779] In other embodiments, the double stranded RNAi agents of the invention comprise a plurality (e.g., 2, 3, 4, 5, or 6) GalNAc or GalNAc derivatives, each independently attached to a plurality of nucleotides of the double stranded RNAi agent through a plurality of linkers, e.g., monovalent linkers.

[0780] In some embodiments, for example, when the two strands of an iRNA agent of the invention is part of one larger molecule connected by an uninterrupted chain of nucleotides between the 3′-end of one strand and the 5′-end of the respective other strand forming a hairpin loop comprising, a plurality of unpaired nucleotides, each unpaired nucleotide within the hairpin loop may independently comprise a GalNAc or GalNAc derivative attached via a monovalent linker.

[0781] In some embodiments, the carbohydrate conjugate further comprises one or more additional ligands as described above, such as, but not limited to, a PK modulator or a cell permeation peptide.

[0782] Additional carbohydrate conjugates and linkers suitable for use in the present invention include those described in WO 2014/179620 and WO 2014/179627, the entire contents of each of which are incorporated herein by reference.

### D. Linkers

[0783] In some embodiments, the conjugate or ligand described herein can be attached to an iRNA oligonucleotide with various linkers that can be cleavable or non-cleavable.

[0784] The term “linker” or “linking group” means an organic moiety that connects two parts of a compound, e.g., covalently attaches two parts of a compound. Linkers typically comprise a direct bond or an atom such as oxygen or sulfur, a unit such as NR8, C(O), C(O)NH, SO, SO₂, SO₂NH or a chain of atoms, such as, but not limited to, substituted or unsubstituted alkyl, substituted or unsubstituted alkenyl, substituted or unsubstituted alkynyl, arylalkyl, arylalkenyl, arylalkynyl, heteroarylalkyl, heteroarylalkenyl, heteroarylalkynyl, heterocyclylalkyl, heterocyclylalkenyl, heterocyclylalkynyl, aryl, heteroaryl, heterocyclyl, cycloalkyl, cycloalkenyl, alkylarylalkyl, alkylarylalkenyl, alkylarylalkynyl, alkenylarylalkyl, alkenylarylalkenyl, alkenylarylalkynyl, alkynylarylalkyl, alkynylarylalkenyl, alkynylarylalkynyl, alkylheteroarylalkyl, alkylheteroarylalkenyl, alkylheteroarylalkynyl, alkenylheteroarylalkyl, alkenylheteroarylalkenyl, alkenylheteroarylalkynyl, alkynylheteroarylalkyl, alkynylheteroarylalkenyl, alkynylheteroarylalkynyl, alkylheterocyclylalkyl, alkylheterocyclylalkenyl, alkylhererocyclylalkynyl, alkenylheterocyclylalkyl, alkenylheterocyclylalkenyl, alkenylheterocyclylalkynyl, alkynylheterocyclylalkyl, alkynylheterocyclylalkenyl, alkynylheterocyclylalkynyl, alkylaryl, alkenylaryl, alkynylaryl, alkylheteroaryl, alkenylheteroaryl, alkynylhereroaryl, which one or more methylenes can be interrupted or terminated by O. S. S(O), SO₂, N(R⁸), C(O), substituted or unsubstituted aryl, substituted or unsubstituted heteroaryl, substituted or unsubstituted heterocyclic; where R⁸ is hydrogen, acyl, aliphatic or substituted aliphatic. In certain embodiments, the linker is between about 1-24 atoms, 2-24, 3-24, 4-24, 5-24, 6-24, 6-18, 7-18, 8-18 atoms, 7-17, 8-17, 6-16, 7-16, or 8-16 atoms.

[0785] A cleavable linking group is one which is sufficiently stable outside the cell, but which upon entry into a target cell is cleaved to release the two parts the linker is holding together. In a preferred embodiment, the cleavable linking group is cleaved at least about 10 times, 20, times, 30 times, 40 times, 50 times, 60 times, 70 times, 80 times, 90 times or more, or at least about 100 times faster in a target cell or under a first reference condition (which can, e.g., be selected to mimic or represent intracellular conditions) than in the blood of a subject, or under a second reference condition (which can, e.g., be selected to mimic or represent conditions found in the blood or serum).

[0786] Cleavable linking groups are susceptible to cleavage agents, e.g., pH, redox potential or the presence of degradative molecules. Generally, cleavage agents are more prevalent or found at higher levels or activities inside cells than in serum or blood. Examples of such degradative agents include: redox agents which are selected for particular substrates or which have no substrate specificity, including, e.g., oxidative or reductive enzymes or reductive agents such as mercaptans, present in cells, that can degrade a redox cleavable linking group by reduction; esterases; endosomes or agents that can create an acidic environment, e.g., those that result in a pH of five or lower; enzymes that can hydrolyze or degrade an acid cleavable linking group by acting as a general acid, peptidases (which can be substrate specific), and phosphatases.

[0787] A cleavable linkage group, such as a disulfide bond can be susceptible to pH. The pH of human serum is 7.4, while the average intracellular pH is slightly lower, ranging from about 7.1-7.3. Endosomes have a more acidic pH, in the range of 5.5-6.0, and lysosomes have an even more acidic pH at around 5.0. Some linkers will have a cleavable linking group that is cleaved at a preferred pH, thereby releasing a cationic lipid from the ligand inside the cell, or into the desired compartment of the cell.

[0788] A linker can include a cleavable linking group that is cleavable by a particular enzyme. The type of cleavable linking group incorporated into a linker can depend on the cell to be targeted. For example, a liver-targeting ligand can be linked to a cationic lipid through a linker that includes an ester group. Liver cells are rich in esterases, and therefore the linker will be cleaved more efficiently in liver cells than in cell types that are not esterase-rich. Other cell-types rich in esterases include cells of the lung, renal cortex, and testis.

[0789] Linkers that contain peptide bonds can be used when targeting cell types rich in peptidases, such as liver cells and synoviocytes.

[0790] In general, the suitability of a candidate cleavable linking group can be evaluated by testing the ability of a degradative agent (or condition) to cleave the candidate linking group. It will also be desirable to also test the candidate cleavable linking group for the ability to resist cleavage in the blood or when in contact with other non-target tissue. Thus, one can determine the relative susceptibility to cleavage between a first and a second condition, where the first is selected to be indicative of cleavage in a target cell and the second is selected to be indicative of cleavage in other tissues or biological fluids, e.g., blood or serum. The evaluations can be carried out in cell free systems, in cells, in cell culture, in organ or tissue culture, or in whole animals. It can be useful to make initial evaluations in cell-free or culture conditions and to confirm by further evaluations in whole animals. In preferred embodiments, useful candidate compounds are cleaved at least about 2, 4. 10, 20, 30, 40, 50, 60, 70, 80, 90, or about 100 times faster in the cell (or under in vitro conditions selected to mimic intracellular conditions) as compared to blood or serum (or under in vitro conditions selected to mimic extracellular conditions).

i. Redox Cleavable Linking Groups

[0791] In certain embodiments, a cleavable linking group is a redox cleavable linking group that is cleaved upon reduction or oxidation. An example of reductively cleavable linking group is a disulphide linking group (—S—S—). To determine if a candidate cleavable linking group is a suitable “reductively cleavable linking group.” or for example is suitable for use with a particular iRNA moiety and particular targeting agent one can look to methods described herein. For example, a candidate can be evaluated by incubation with dithiothreitol (DTT), or other reducing agent using reagents know in the art, which mimic the rate of cleavage which would be observed in a cell, e.g., a target cell. The candidates can also be evaluated under conditions which are selected to mimic blood or serum conditions. In one, candidate compounds are cleaved by at most about 10% in the blood. In other embodiments, useful candidate compounds are degraded at least about 2, 4, 10, 20, 30, 40, 50, 60, 70, 80, 90, or about 100 times faster in the cell (or under in vitro conditions selected to mimic intracellular conditions) as compared to blood (or under in vitro conditions selected to mimic extracellular conditions). The rate of cleavage of candidate compounds can be determined using standard enzyme kinetics assays under conditions chosen to mimic intracellular media and compared to conditions chosen to mimic extracellular media.

### ii Phosphate-Based Cleavable Linking Groups

[0792] In certain embodiments, a cleavable linker comprises a phosphate-based cleavable linking group. A phosphate-based cleavable linking group is cleaved by agents that degrade or hydrolyze the phosphate group. An example of an agent that cleaves phosphate groups in cells are enzymes such as phosphatases in cells. Examples of phosphate-based linking groups are —O—P(O)(ORk)—O—, —O—P(S)(ORk)—O—, —O—P(S)(SRk)—O—, —S—P(O)(ORk)—O—, —O—P(O)(ORk)—S—, —S—P(O)(ORk)—S—, —O—P(S)(ORk)—S—, —S—P(S)(ORk)—O—, —O—P(O)(Rk)—O—, —O—P(S)(Rk)—O—, —S—P(O)(Rk)—O—, —S—P(S)(Rk)—O—, —S—P(O)(Rk)—S—, —O—P(S)(Rk)—S—. Preferred embodiments are —O—P(O)(OH)—O—, —O—P(S)(OH)—O—, —O—preferred embodiment is —O—P(O)(OH)—O—. These candidates can be evaluated using methods analogous to those described above.

iii. Acid Cleavable Linking Groups

[0793] In certain embodiments, a cleavable linker comprises an acid cleavable linking group. An acid cleavable linking group is a linking group that is cleaved under acidic conditions. In preferred embodiments acid cleavable linking groups are cleaved in an acidic environment with a pH of about 6.5 or lower (e.g., about 6.0, 5.75, 5.5, 5.25, 5.0, or lower), or by agents such as enzymes that can act as a general acid. In a cell, specific low pH organelles, such as endosomes and lysosomes can provide a cleaving environment for acid cleavable linking groups. Examples of acid cleavable linking groups include but are not limited to hydrazones, esters, and esters of amino acids. Acid cleavable groups can have the general formula —C═NN—, C(O)O, or —OC(O). A preferred embodiment is when the carbon attached to the oxygen of the ester (the alkoxy group) is an aryl group, substituted alkyl group, or tertiary alkyl group such as dimethyl pentyl or t-butyl. These candidates can be evaluated using methods analogous to those described above.

iv. Ester-Based Cleavable Linking Groups

[0794] In certain embodiments, a cleavable linker comprises an ester-based cleavable linking group. An ester-based cleavable linking group is cleaved by enzymes such as esterases and amidases in cells. Examples of ester-based cleavable linking groups include but are not limited to esters of alkylene, alkenylene and alkynylene groups. Ester cleavable linking groups have the general formula —C(O)O—, or —OC(O)—. These candidates can be evaluated using methods analogous to those described above.

v. Peptide-Based Cleavable Linking Groups

[0795] In yet another embodiment, a cleavable linker comprises a peptide-based cleavable linking group. A peptide-based cleavable linking group is cleaved by enzymes such as peptidases and proteases in cells. Peptide-based cleavable linking groups are peptide bonds formed between amino acids to yield oligopeptides (e.g., dipeptides, tripeptides etc.) and polypeptides. Peptide-based cleavable groups do not include the amide group (—C(O)NH—). The amide group can be formed between any alkylene, alkenylene or alkynelene. A peptide bond is a special type of amide bond formed between amino acids to yield peptides and proteins. The peptide based cleavage group is generally limited to the peptide bond (i.e., the amide bond) formed between amino acids yielding peptides and proteins and does not include the entire amide functional group. Peptide-based cleavable linking groups have the general formula—NHCHRAC(O)NHCHRBC(O)—, where RA and RB are the R groups of the two adjacent amino acids. These candidates can be evaluated using methods analogous to those described above.

[0796] In some embodiments, an iRNA of the invention is conjugated to a carbohydrate through a linker. Non-limiting examples of iRNA carbohydrate conjugates with linkers of the compositions and methods of the invention include, but are not limited to.

[chemical structure]

[chemical structure]

when one of X or Y is an oligonucleotide, the other is a hydrogen.

[0797] In certain embodiments of the compositions and methods of the invention, a ligand is one or more “GalNAc” (N-acetylgalactosamine) derivatives attached through a bivalent or trivalent branched linker.

[0798] In certain embodiments, a deRNA of the invention is conjugated to a bivalent or trivalent branched linker selected from the group of structures shown in any of formula (XLV)-(XLVI):

[chemical structure]

[0799] wherein:
[0800] q2A, q2B, q3A, q3B, q4A, q4B, q5A, q5B and q5C represent independently for each occurrence 0-20 and wherein the repeating unit can be the same or different;
[0801] P^{2A}, P^{2B}, P^{3A}, P^{3B}, P^{4A}, P^{4B}, P^{5A}, P^{5B}, P^{5C}, T^{2A}, T^{2B}, T^{3A}, T^{3B}, T^{4A}, T^{4B}, T^{4A}, T^{5B}, T^{5C} are each independently for each occurrence absent, CO, NH, O, S, OC(O), NHC(O), CH₂, CH₂NH or CH₂O;
[0802] Q^{2A}, Q^{2B}, Q^{3A}, Q^{3B}, Q^{4A}, Q^{4B}, Q^{5A}, Q^{5B}, Q^{5C} are independently for each occurrence absent, alkylene, substituted alkylene wherein one or more methylenes can be interrupted or terminated by one or more of O, S, S(O), SO₂, N(RN), C(R′)═C(R″), C═C or C(O);
[0803] R^{2A}, R^{2B}, R^{3A}, R^{3B}, R^{4A}, R^{4B}, R^{5A}, R^{5B}, R^{5C} are each independently for each occurrence absent,
   NH, O, S, CH₂, C(O)O, C(O)NH, NHCH(R^{a})C(O), —C(O)—CH(Ra)—NH—, CO, CH═N—O,

[chemical structure]

or heterocyclyl;

[0804] L^{2A}, L^{2B}, L^{3A}, L^{3B}, L^{4A}, L^{4B}, L^{5A}, L⁵B and L⁵° C. represent the ligand; i.e. each independently for each occurrence a monosaccharide (such as GalNAc), disaccharide, trisaccharide, tetrasaccharide, oligosaccharide, or polysaccharide; and R^{a} is H or amino acid side chain. Trivalent conjugating GalNAc derivatives are particularly useful for use with RNAi agents for inhibiting the expression of a target gene, such as those of formula (XLIX):

[chemical structure]

[0805] wherein L^{5A}, L^{5B} and L^{5C} represent a monosaccharide, such as GalNAc derivative.

[0806] Examples of suitable bivalent and trivalent branched linker groups conjugating GalNAc derivatives include, but are not limited to, the structures recited above as formulas II, VII, XI, X, and XIII.

[0807] Representative U.S. Patents that teach the preparation of RNA conjugates include, but are not limited to, U.S. Pat. Nos. 4,828,979; 4,948,882; 5,218,105; 5,525,465; 5,541,313; 5,545,730; 5,552,538; 5,578,717, 5,580,731; 5,591,584; 5,109,124; 5,118,802; 5,138,045; 5,414,077; 5,486,603; 5,512,439; 5,578,718; 5,608,046; 4,587,044; 4,605,735; 4,667,025; 4,762,779; 4,789,737; 4,824,941; 4,835,263; 4,876,335; 4,904,582; 4,958,013; 5,082,830; 5,112,963; 5,214,136; 5,082,830; 5,112,963; 5,214,136; 5,245,022; 5,254,469; 5,258,506; 5,262,536; 5,272,250; 5,292,873; 5,317,098; 5,371,241, 5,391,723; 5,416,203, 5,451,463; 5,510,475; 5,512,667; 5,514,785; 5,565,552; 5,567,810; 5,574,142; 5,585,481; 5,587,371; 5,595,726; 5,597,696; 5,599,923; 5,599,928; 5,688,941; 6,294,664; 6,320,017; 6,576,752; 6,783,931; 6,900,297; 7,037,646; and 8,106,022, the entire contents of each of which are hereby incorporated herein by reference.

[0808] It is not necessary for all positions in a given compound to be uniformly modified, and in fact more than one of the aforementioned modifications can be incorporated in a single compound or even at a single nucleoside within an iRNA. The present invention also includes iRNA compounds that are chimeric compounds.

[0809] “Chimeric” iRNA compounds or “chimeras,” in the context of this invention, are iRNA compounds, preferably dsRNA agents, that contain two or more chemically distinct regions, each made up of at least one monomer unit, i.e., a nucleotide in the case of a dsRNA compound. These iRNAs typically contain at least one region wherein the RNA is modified so as to confer upon the iRNA increased resistance to nuclease degradation, increased cellular uptake, or increased binding affinity for the target nucleic acid. An additional region of the iRNA can serve as a substrate for enzymes capable of cleaving RNA:DNA or RNA: RNA hybrids. By way of example, RNase H is a cellular endonuclease which cleaves the RNA strand of an RNA:DNA duplex. Activation of RNase H, therefore, results in cleavage of the RNA target, thereby greatly enhancing the efficiency of iRNA inhibition of gene expression. Consequently, comparable results can often be obtained with shorter iRNAs when chimeric dsRNAs are used, compared to phosphorothioate deoxy dsRNAs hybridizing to the same target region. Cleavage of the RNA target can be routinely detected by gel electrophoresis and, if necessary, associated nucleic acid hybridization techniques known in the art.

[0810] In certain instances, the RNA of an iRNA can be modified by a non-ligand group. A number of non-ligand molecules have been conjugated to iRNAs in order to enhance the activity, cellular distribution or cellular uptake of the iRNA, and procedures for performing such conjugations are available in the scientific literature. Such non-ligand moieties have included lipid moieties, such as cholesterol (Kubo, T. et al., Biochem. Biophys. Res. Comm., 2007, 365(1):54-61; Letsinger et al., Proc. Natl. Acad. Sci. USA, 1989, 86:6553), cholic acid (Manoharan et al., Bioorg. Med. Chem. Lett., 1994, 4:1053), a thioether, e.g., hexyl-S-tritylthiol (Manoharan et al., Ann. N.Y. Acad. Sci., 1992, 660:306; Manoharan et al., Bioorg. Med. Chem. Let., 1993, 3:2765), a thiocholesterol (Oberhauser et al., Nucl. Acids Res., 1992, 20:533), an aliphatic chain, e.g., dodecandiol or undecyl residues (Saison-Behmoaras et al., EMBO J., 1991, 10:111; Kabanov et al., FEBS Lett., 1990, 259:327; Svinarchuk et al., Biochimie, 1993, 75:49), a phospholipid, e.g., di-hexadecyl-rac-glycerol or triethylammonium 1,2-di-O-hexadecyl-rac-glycero-3-H-phosphonate (Manoharan et al., Tetrahedron Lett., 1995, 36:3651; Shea et al., Nucl. Acids Res., 1990, 18:3777), a polyamine or a polyethylene glycol chain (Manoharan et al., Nucleosides & Nucleotides, 1995, 14:969), or adamantane acetic acid (Manoharan et al., Tetrahedron Lett., 1995, 36:3651), a palmityl moiety (Mishra et al., Biochim. Biophys. Acta, 1995, 1264:229), or an octadecylamine or hexylamino-carbonyl-oxycholesterol moiety (Crooke et al., J. Pharmacol. Exp. Ther., 1996, 277:923). Representative United States patents that teach the preparation of such RNA conjugates have been listed above. Typical conjugation protocols involve the synthesis of RNAs bearing an aminolinker at one or more positions of the sequence. The amino group is then reacted with the molecule being conjugated using appropriate coupling or activating reagents. The conjugation reaction can be performed either with the RNA still bound to the solid support or following cleavage of the RNA, in solution phase. Purification of the RNA conjugate by HPLC typically affords the pure conjugate.

### V. Delivery of an RNAi Agent of the Disclosure

[0811] The delivery of an RNAi agent of the disclosure to a cell e.g., a cell within a subject, such as a human subject (e.g., a subject in need thereof, such as a subject having a C9orf72-associated disorder, e.g., C9orf72-associated disease, can be achieved in a number of different ways. For example, delivery may be performed by contacting a cell with an RNAi agent of the disclosure either in vitro or in vivo. In vivo delivery may also be performed directly by administering a composition comprising an RNAi agent, e.g., a dsRNA, to a subject. Alternatively, in vivo delivery may be performed indirectly by administering one or more vectors that encode and direct the expression of the RNAi agent. These alternatives are discussed further below.

[0812] In general, any method of delivering a nucleic acid molecule (in vitro or in vivo) can be adapted for use with an RNAi agent of the disclosure (see e.g., Akhtar S. and Julian RL., (1992) Trends Cell. Biol. 2(5): 139-144 and WO94/02595, which are incorporated herein by reference in their entireties). For in vivo delivery, factors to consider in order to deliver an RNAi agent include, for example, biological stability of the delivered agent, prevention of non-specific effects, and accumulation of the delivered agent in the target tissue. The non-specific effects of an RNAi agent can be minimized by local administration, for example, by direct injection or implantation into a tissue or topically administering the preparation. Local administration to a treatment site maximizes local concentration of the agent, limits the exposure of the agent to systemic tissues that can otherwise be harmed by the agent or that can degrade the agent, and permits a lower total dose of the RNAi agent to be administered. Several studies have shown successful knockdown of gene products when an RNAi agent is administered locally. For example, intraocular delivery of a VEGF dsRNA by intravitreal injection in cynomolgus monkeys (Tolentino, M J. et al., (2004) Retina 24:132-138) and subretinal injections in mice (Reich, S J. et al. (2003) Mol. Vis. 9:210-216) were both shown to prevent neovascularization in an experimental model of age-related macular degeneration. In addition, direct intratumoral injection of a dsRNA in mice reduces tumor volume (Pille. J. et al. (2005) Mol. Ther. 11:267-274) and can prolong survival of tumor-bearing mice (Kim. W J. et al., (2006) Mol. Ther. 14:343-350; Li. S. et al., (2007) Mol. Ther. 15:515-523). RNA interference has also shown success with local delivery to the CNS by direct injection (Dorn. G. et al., (2004) Nucleic Acids 32:c49; Tan. PH. et al. (2005) Gene Ther. 12:59-66; Makimura, H. et al. (2002) BMC Neurosci. 3:18; Shishkina. GT., et al. (2004) Neuroscience 129:521-528; Thakker, E R., et al. (2004) Proc. Natl. Acad. Sci. U.S.A. 101:17270-17275; Akancya. Y., et al. (2005) J. Neurophysiol. 93:594-602) and to the lungs by intranasal administration (Howard, K A. et al., (2006) Mol. Ther. 14:476-484; Zhang. X. et al., (2004) J. Biol. Chem. 279:10677-10684; Bitko. V. et al., (2005) Nat. Med. 11:50-55). For administering an RNAi agent systemically for the treatment of a disease, the RNA can be modified or alternatively delivered using a drug delivery system; both methods act to prevent the rapid degradation of the dsRNA by endo- and exo-nucleases in vivo. Modification of the RNA or the pharmaceutical carrier can also permit targeting of the RNAi agent to the target tissue and avoid undesirable off-target effects (e.g., without wishing to be bound by theory, use of GNAs as described herein has been identified to destabilize the seed region of a dsRNA, resulting in enhanced preference of such dsRNAs for on-target effectiveness, relative to off-target effects, as such off-target effects are significantly weakened by such seed region destabilization). RNAi agents can be modified by chemical conjugation to lipophilic groups such as cholesterol to enhance cellular uptake and prevent degradation. For example, an RNAi agent directed against ApoB conjugated to a lipophilic cholesterol moiety was injected systemically into mice and resulted in knockdown of apoB mRNA in both the liver and jejunum (Soutschek. J. et al., (2004) Nature 432:173-178). Conjugation of an RNAi agent to an aptamer has been shown to inhibit tumor growth and mediate tumor regression in a mouse model of prostate cancer (McNamara, J O. et al., (2006) Nat. Biotechnol. 24:1005-1015). In an alternative embodiment, the RNAi agent can be delivered using drug delivery systems such as a nanoparticle, a dendrimer, a polymer, liposomes, or a cationic delivery system. Positively charged cationic delivery systems facilitate binding of molecule RNAi agent (negatively charged) and also enhance interactions at the negatively charged cell membrane to permit efficient uptake of an RNAi agent by the cell. Cationic lipids, dendrimers, or polymers can either be bound to an RNAi agent, or induced to form a vesicle or micelle (see e.g., Kim SH. et al., (2008) Journal of Controlled Release 129(2): 107-116) that encases an RNAi agent. The formation of vesicles or micelles further prevents degradation of the RNAi agent when administered systemically. Methods for making and administering cationic-RNAi agent complexes are well within the abilities of one skilled in the art (see e.g., Sorensen, D R., et al. (2003) J. Mol. Biol 327:761-766; Verma, U N. et al., (2003) Clin. Cancer Res. 9:1291-1300; Arnold, A S et al. (2007) J. Hypertens. 25:197-205, which are incorporated herein by reference in their entirety). Some non-limiting examples of drug delivery systems useful for systemic delivery of RNAi agents include DOTAP (Sorensen, D R., et al (2003), supra; Verma, U N. et al., (2003), supra), Oligofectamine, “solid nucleic acid lipid particles” (Zimmermann, T S. et al., (2006) Nature 441:111-114), cardiolipin (Chien, P Y. et al., (2005) Cancer Gene Ther. 12:321-328; Pal, A. et al., (2005) Int J. Oncol. 26:1087-1091), polyethyleneimine (Bonnet ME. et al., (2008) Pharm. Res. Aug 16 Epub ahead of print; Aigner, A. (2006) J. Biomed. Biotechnol. 71659), Arg-Gly-Asp (RGD) peptides (Liu, S. (2006) Mol. Pharm. 3:472-487), and polyamidoamines (Tomalia, D A. et al., (2007) Biochem. Soc. Trans. 35:61-67; Yoo, H. et al., (1999) Pharm. Res. 16:1799-1804). In some embodiments, an RNAi agent forms a complex with cyclodextrin for systemic administration. Methods for administration and pharmaceutical compositions of RNAi agents and cyclodextrins can be found in U.S. Pat. No. 7, 427, 605, which is herein incorporated by reference in its entirety.

[0813] Certain aspects of the instant disclosure relate to a method of reducing the expression of a C9orf72 target gene in a cell, comprising contacting said cell with the double-stranded RNAi agent of the disclosure. In one embodiment, the cell is an extraheptic cell, optionally a CNS cell.

[0814] Another aspect of the disclosure relates to a method of reducing the expression of a C9orf72 target gene in a subject, comprising administering to the subject the double-stranded RNAi agent of the disclosure.

[0815] Another aspect of the disclosure relates to a method of treating a subject having a CNS disorder, comprising administering to the subject a therapeutically effective amount of the double-stranded C9orf72-targeting RNAi agent of the disclosure, thereby treating the subject. Exemplary CNS disorders that can be treated by the method of the disclosure include C9orf72-associated disease.

[0816] In one embodiment, the double-stranded RNAi agent is administered intrathecally. By intrathecal administration of the double-stranded RNAi agent, the method can reduce the expression of a C9orf72 target gene in a brain (e.g., striatum) or spine tissue, for instance, cortex, cerebellum, cervical spine, lumbar spine, and thoracic spine.

[0817] For ease of exposition the formulations, compositions and methods in this section are discussed largely with regard to modified siRNA compounds. It may be understood, however, that these formulations, compositions and methods can be practiced with other siRNA compounds, e.g., unmodified siRNA compounds, and such practice is within the disclosure. A composition that includes an RNAi agent can be delivered to a subject by a variety of routes. Exemplary routes include: intrathecal, intravenous, topical, rectal, anal, vaginal, nasal, pulmonary, and ocular.

[0818] The RNAi agents of the disclosure can be incorporated into pharmaceutical compositions suitable for administration. Such compositions typically include one or more species of RNAi agent and a pharmaceutically acceptable carrier. As used herein the language “pharmaceutically acceptable carrier” is intended to include any and all solvents, dispersion media, coatings, antibacterial and antifungal agents, isotonic and absorption delaying agents, and the like, compatible with pharmaceutical administration. The use of such media and agents for pharmaceutically active substances is well known in the art. Except insofar as any conventional media or agent is incompatible with the active compound, use thereof in the compositions is contemplated. Supplementary active compounds can also be incorporated into the compositions.

[0819] The pharmaceutical compositions of the present disclosure may be administered in a number of ways depending upon whether local or systemic treatment is desired and upon the area to be treated. Administration may be topical (including ophthalmic, vaginal, rectal, intranasal, transdermal), oral, or parenteral. Parenteral administration includes intravenous drip, subcutaneous, intraperitoneal or intramuscular injection, or intrathecal or intraventricular or intracerebroventricular administration.

[0820] The route and site of administration may be chosen to enhance targeting. For example, to target muscle cells, intramuscular injection into the muscles of interest would be a logical choice. Lung cells might be targeted by administering the RNAi agent in aerosol form. The vascular endothelial cells could be targeted by coating a balloon catheter with the RNAi agent and mechanically introducing the RNA.

[0821] Formulations for topical administration may include transdermal patches, ointments, lotions, creams, gels, drops, suppositories, sprays, liquids, and powders. Conventional pharmaceutical carriers, aqueous, powder or oily bases, thickeners and the like may be necessary or desirable. Coated condoms, gloves and the like may also be useful.

[0822] Compositions for oral administration include powders or granules, suspensions or solutions in water, syrups, elixirs or non-aqueous media, tablets, capsules, lozenges, or troches. In the case of tablets, carriers that can be used include lactose, sodium citrate and salts of phosphoric acid. Various disintegrants such as starch, and lubricating agents such as magnesium stearate, sodium lauryl sulfate and talc, are commonly used in tablets. For oral administration in capsule form, useful diluents are lactose and high molecular weight polyethylene glycols. When aqueous suspensions are required for oral use, the nucleic acid compositions can be combined with emulsifying and suspending agents. If desired, certain sweetening or flavoring agents can be added.

[0823] Compositions for intrathecal or intraventricular administration may include sterile aqueous solutions which may also contain buffers, diluents, and other suitable additives.

[0824] Formulations for parenteral administration may include sterile aqueous solutions which may also contain buffers, diluents, and other suitable additives. Intraventricular injection may be facilitated by an intraventricular catheter, for example, attached to a reservoir. For intravenous use, the total concentration of solutes may be controlled to render the preparation isotonic.

[0825] In one embodiment, the administration of the siRNA compound, e.g., a double-stranded siRNA compound, or ssiRNA compound, composition is parenteral, e.g., intravenous (e.g., as a bolus or as a diffusible infusion), intradermal, intraperitoneal, intramuscular, intrathecal, intraventricular, intracerebroventricular, intracranial, subcutaneous, transmucosal, buccal, sublingual, endoscopic, rectal, oral, vaginal, topical, pulmonary, intranasal, urethral, or ocular. Administration can be provided by the subject or by another person, e.g., a health care provider. The medication can be provided in measured doses or in a dispenser which delivers a metered dose. Selected modes of delivery are discussed in more detail below.

### A. Intrathecal Administration.

[0826] In one embodiment, the double-stranded RNAi agent is delivered by intrathecal injection (i.e., injection into the spinal fluid which bathes the brain and spinal cord tissue). Intrathecal injection of RNAi agents into the spinal fluid can be performed as a bolus injection or via minipumps which can be implanted beneath the skin, providing a regular and constant delivery of siRNA into the spinal fluid. The circulation of the spinal fluid from the choroid plexus, where it is produced, down around the spinal chord and dorsal root ganglia and subsequently up past the cerebellum and over the cortex to the arachnoid granulations, where the fluid can exit the CNS, that, depending upon size, stability, and solubility of the compounds injected, molecules delivered intrathecally could hit targets throughout the entire CNS.

[0827] In some embodiments, the intrathecal administration is via a pump. The pump may be a surgically implanted osmotic pump. In one embodiment, the osmotic pump is implanted into the subarachnoid space of the spinal canal to facilitate intrathecal administration.

[0828] In some embodiments, the intrathecal administration is via an intrathecal delivery system for a pharmaceutical including a reservoir containing a volume of the pharmaceutical agent, and a pump configured to deliver a portion of the pharmaceutical agent contained in the reservoir. More details about this intrathecal delivery system may be found in WO 2015/116658, which is incorporated by reference in its entirety.

[0829] The amount of intrathecally injected RNAi agents may vary from one target gene to another target gene and the appropriate amount that has to be applied may have to be determined individually for each target gene. Typically, this amount ranges from 10 μg to 2 mg, preferably 50 μg to 1500 μg, more preferably 100 μg to 1000 μg.

B. Vector encoded RNAi agents of the Disclosure

[0830] RNAi agents targeting the C9orf72 gene can be expressed from transcription units inserted into DNA or RNA vectors (see, e.g., Couture, A, et al., TIG. (1996), 12:5-10; WO 00/22113, WO 00/22114, and U.S. Pat. No. 6,054,299). Expression is preferablysustained (months or longer), depending upon the specific construct used and the target tissue or cell type. These transgenes can be introduced as a linear construct, a circular plasmid, or a viral vector, which can be an integrating or non-integrating vector. The transgene can also be constructed to permit it to be inherited as an extrachromosomal plasmid (Gassmann, et al., (1995) Proc. Natl. Acad. Sci. USA 92:1292).

[0831] The individual strand or strands of an RNAi agent can be transcribed from a promoter on an expression vector. Where two separate strands are to be expressed to generate, for example, a dsRNA, two separate expression vectors can be co-introduced (e.g., by transfection or infection) into a target cell. Alternatively, each individual strand of a dsRNA can be transcribed by promoters both of which are located on the same expression plasmid. In one embodiment, a dsRNA is expressed as inverted repeat polynucleotides joined by a linker polynucleotide sequence such that the dsRNA has a stem and loop structure.

[0832] RNAi agent expression vectors are generally DNA plasmids or viral vectors. Expression vectors compatible with eukaryotic cells, preferably those compatible with vertebrate cells, can be used to produce recombinant constructs for the expression of an RNAi agent as described herein. Delivery of RNAi agent expressing vectors can be systemic, such as by intravenous or intramuscular administration, by administration to target cells ex-planted from the patient followed by reintroduction into the patient, or by any other means that allows for introduction into a desired target cell.

[0833] Viral vector systems which can be utilized with the methods and compositions described herein include, but are not limited to, (a) adenovirus vectors; (b) retrovirus vectors, including but not limited to lentiviral vectors, moloney murine leukemia virus, etc.; (c) adeno-associated virus vectors; (d) herpes simplex virus vectors; (e) SV 40 vectors; (f) polyoma virus vectors; (g) papilloma virus vectors; (h) picornavirus vectors; (i) pox virus vectors such as an orthopox, e.g., vaccinia virus vectors or avipox, e.g. canary pox or fowl pox; and (j) a helper-dependent or gutless adenovirus. Replication-defective viruses can also be advantageous. Different vectors will or will not become incorporated into the cells' genome. The constructs can include viral sequences for transfection, if desired. Alternatively, the construct can be incorporated into vectors capable of episomal replication, e.g. EPV and EBV vectors. Constructs for the recombinant expression of an RNAi agent will generally require regulatory elements, e.g., promoters, enhancers, etc., to ensure the expression of the RNAi agent in target cells. Other aspects to consider for vectors and constructs are known in the art.

### VI. Compositions of the Invention

[0834] The present disclosure also includes compositions, including pharmaceutical compositions and formulations which include the RNAi agents of the disclosure.

[0835] For example, in one embodiment, the present invention provides compositions comprising two or more, e.g., 2, 3, or 4, dsRNA agents,

[0836] In another embodiment, provided herein are pharmaceutical compositions containing an RNAi agent, as described herein, and a pharmaceutically acceptable carrier. The pharmaceutical compositions containing the RNAi agent are useful for treating a disease or disorder associated with the expression or activity of C9orf72. e.g., C9orf72-associated disease.

[0837] In some embodiments, the pharmaceutical compositions of the invention are sterile. In another embodiment, the pharmaceutical compositions of the invention are pyrogen free.

[0838] Such pharmaceutical compositions are formulated based on the mode of delivery. One example is compositions that are formulated for systemic administration via parenteral delivery, e.g., by intravenous (IV), intramuscular (IM), or for subcutaneous (subQ) delivery. Another example is compositions that are formulated for direct delivery into the CNS, e.g., by intrathecal or intravitreal or intraventricular or intracerebroventricular administration, or by intraroutes of injection, optionally by infusion into the brain (e.g., striatum), such as by continuous pump infusion.

[0839] The pharmaceutical compositions of the disclosure may be administered in dosages sufficient to inhibit expression of a C9orf72 gene. In general, a suitable dose of an RNAi agent of the disclosure will be in the range of about 0.001 to about 200.0 milligrams per kilogram body weight of the recipient per day, generally in the range of about 1 to 50 mg per kilogram body weight per day.

[0840] A repeat-dose regimen may include administration of a therapeutic amount of an RNAi agent on a regular basis, such as monthly to once every six months. In certain embodiments, the RNAi agent is administered about once per quarter (i.e., about once every three months) to about twice per year.

[0841] After an initial treatment regimen (e.g., loading dose), the treatments can be administered on a less frequent basis.

[0842] In other embodiments, a single dose of the pharmaceutical compositions can be long lasting, such that subsequent doses are administered at not more than 1, 2, 3, or 4 or more month intervals. In some embodiments of the disclosure, a single dose of the pharmaceutical compositions of the disclosure is administered once per month. In other embodiments of the disclosure, a single dose of the pharmaceutical compositions of the disclosure is administered once per quarter to twice per year.

[0843] The skilled artisan will appreciate that certain factors can influence the dosage and timing required to effectively treat a subject, including but not limited to the severity of the disease or disorder, previous treatments, the general health or age of the subject, and other diseases present. Moreover, treatment of a subject with a therapeutically effective amount of a composition can include a single treatment or a series of treatments.

[0844] Advances in mouse genetics have generated a number of mouse models for the study of various human diseases, such as ALS and FTD that would benefit from reduction in the expression of repeat-containing C9orf72. Such models can be used for in vivo testing of RNAi agents, as well as for determining a therapeutically effective dose. Suitable rodent models are known in the art and include, for example, those described in, for example, Cepeda, et al. (ASN Neuro (2010) 2(2):c00033) and Pouladi, et al. (Nat Reviews (2013) 14:708).

[0845] The pharmaceutical compositions of the present disclosure can be administered in a number of ways depending upon whether local or systemic treatment is desired and upon the area to be treated. Administration can be topical (e.g., by a transdermal patch), pulmonary, e.g., by inhalation or insufflation of powders or aerosols, including by nebulizer; intratracheal, intranasal, epidermal and transdermal, oral or parenteral. Parenteral administration includes intravenous, intraarterial, subcutaneous, intraperitoneal or intramuscular injection or infusion; subdermal, e.g., via an implanted device; or intracranial, e.g., by intraparenchymal, intrathecal, intraventricular, or intracerebroventricular administration.

[0846] The RNAi agents can be delivered in a manner to target a particular tissue, such as the CNS (e.g., neuronal, glial or vascular tissue of the brain) or cell type (e.g., neuron).

[0847] Pharmaceutical compositions and formulations for topical administration can include transdermal patches, ointments, lotions, creams, gels, drops, suppositories, sprays, liquids and powders. Conventional pharmaceutical carriers, aqueous, powder or oily bases, thickeners and the like can be necessary or desirable. Coated condoms, gloves and the like can also be useful. Suitable topical formulations include those in which the RNAi agents featured in the disclosure are in admixture with a topical delivery agent such as lipids, liposomes, fatty acids, fatty acid esters, steroids, chelating agents and surfactants. Suitable lipids and liposomes include neutral (e.g., dioleoylphosphatidyl DOPE ethanolamine, dimyristoylphosphatidyl choline DMPC, distearolyphosphatidyl choline) negative (e.g., dimyristoylphosphatidyl glycerol DMPG) and cationic (e.g., dioleoyltetramethylaminopropyl DOTAP and dioleoylphosphatidyl ethanolamine DOTMA). RNAi agents featured in the disclosure can be encapsulated within liposomes or can form complexes thereto, in particular to cationic liposomes. Alternatively, RNAi agents can be complexed to lipids, in particular to cationic lipids. Suitable fatty acids and esters include but are not limited to arachidonic acid, oleic acid, eicosanoic acid, lauric acid, caprylic acid, capric acid, myristic acid, palmitic acid, stearic acid, linoleic acid, linolenic acid, dicaprate, tricaprate, monoolein, dilaurin, glyceryl 1-monocaprate, 1-dodecylazacycloheptan-2-one, an acylcarnitine, an acylcholine, or a C₁₋₂₀ alkyl ester (e.g., isopropylmyristate IPM), monoglyceride, diglyceride or pharmaceutically acceptable salt thereof. Topical formulations are described in detail in U.S. Pat. No. 6,747,014, which is incorporated herein by reference.

### A. RNAi Agent Formulations Comprising Membranous Molecular Assemblies

[0848] An RNAi agent for use in the compositions and methods of the disclosure can be formulated for delivery in a membranous molecular assembly, e.g., a liposome or a micelle. As used herein, the term “liposome” refers to a vesicle composed of amphiphilic lipids arranged in at least one bilayer, e.g., one bilayer or a plurality of bilayers. Liposomes include unilamellar and multilamellar vesicles that have a membrane formed from a lipophilic material and an aqueous interior. The aqueous portion contains the RNAi agent composition. The lipophilic material isolates the aqueous interior from an aqueous exterior, which typically does not include the RNAi agent composition, although in some examples, it may. Liposomes are useful for the transfer and delivery of active ingredients to the site of action. Because the liposomal membrane is structurally similar to biological membranes, when liposomes are applied to a tissue, the liposomal bilayer fuses with bilayer of the cellular membranes. As the merging of the liposome and cell progresses, the internal aqueous contents that include the RNAi agent are delivered into the cell where the RNAi agent can specifically bind to a target RNA and can mediate RNAi. In some cases the liposomes are also specifically targeted, e.g., to direct the RNAi agent to particular cell types.

[0849] A liposome containing an RNAi agent can be prepared by a variety of methods. In one example, the lipid component of a liposome is dissolved in a detergent so that micelles are formed with the lipid component. For example, the lipid component can be an amphipathic cationic lipid or lipid conjugate. The detergent can have a high critical micelle concentration and may be nonionic. Exemplary detergents include cholate, CHAPS, octylglucoside, deoxycholate, and lauroyl sarcosine. The RNAi agent preparation is then added to the micelles that include the lipid component. The cationic groups on the lipid interact with the RNAi agent and condense around the RNAi agent to form a liposome. After condensation, the detergent is removed, e.g., by dialysis, to yield a liposomal preparation of RNAi agent.

[0850] If necessary a carrier compound that assists in condensation can be added during the condensation reaction, e.g., by controlled addition. For example, the carrier compound can be a polymer other than a nucleic acid (e.g., spermine or spermidine). pH can also adjusted to favor condensation.

[0851] Methods for producing stable polynucleotide delivery vehicles, which incorporate a polynucleotide/cationic lipid complex as structural components of the delivery vehicle, are further described in, e.g., WO 96/37194, the entire contents of which are incorporated herein by reference. Liposome formation can also include one or more aspects of exemplary methods described in Felgner. P. L. et al., (1987) Proc. Natl. Acad. Sci. USA 8:7413-7417; U.S. Pat. Nos. 4,897,355; 5,171,678; Bangham et al., (1965) M. Mol. Biol. 23:238; Olson et al., (1979) Biochim. Biophys. Acta 557:9; Szoka et al., (1978) Proc. Natl. Acad. Sci. 75: 4194; Mayhew et al., (1984) Biochim. Biophys. Acta 775:169; Kim et al., (1983) Biochim. Biophys. Acta 728:339; and Fukunaga et al., (1984) Endocrinol. 115:757. Commonly used techniques for preparing lipid aggregates of appropriate size for use as delivery vehicles include sonication and freeze-thaw plus extrusion (see, e.g., Mayer et al., (1986) Biochim. Biophys. Acta 858:161. Microfluidization can be used when consistently small (50 to 200 nm) and relatively uniform aggregates are desired (Mayhew et al., (1984) Biochim. Biophys. Acta 775:169. These methods are readily adapted to packaging RNAi agent preparations into liposomes.

[0852] Liposomes fall into two broad classes. Cationic liposomes are positively charged liposomes which interact with the negatively charged nucleic acid molecules to form a stable complex. The positively charged nucleic acid/liposome complex binds to the negatively charged cell surface and is internalized in an endosome. Due to the acidic pH within the endosome, the liposomes are ruptured, releasing their contents into the cell cytoplasm (Wang et al. (1987) Biochem. Biophys. Res. Commun., 147:980-985).

[0853] Liposomes, which are pH-sensitive or negatively charged, entrap nucleic acids rather than complex with them. Since both the nucleic acid and the lipid are similarly charged, repulsion rather than complex formation occurs. Nevertheless, some nucleic acid is entrapped within the aqueous interior of these liposomes. pH sensitive liposomes have been used to deliver nucleic acids encoding the thymidine kinase gene to cell monolayers in culture. Expression of the exogenous gene was detected in the target cells (Zhou et al. (1992) Journal of Controlled Release, 19:269-274).

[0854] One major type of liposomal composition includes phospholipids other than naturally-derived phosphatidylcholine. Neutral liposome compositions, for example, can be formed from dimyristoyl phosphatidylcholine (DMPC) or dipalmitoyl phosphatidylcholine (DPPC). Anionic liposome compositions generally are formed from dimyristoyl phosphatidylglycerol, while anionic fusogenic liposomes are formed primarily from dioleoyl phosphatidylethanolamine (DOPE). Another type of liposomal composition is formed from phosphatidylcholine (PC) such as, for example, soybean PC, and egg PC. Another type is formed from mixtures of phospholipid or phosphatidylcholine or cholesterol.

[0855] Examples of other methods to introduce liposomes into cells in vitro and in vivo include U.S. Pat. Nos. 5,283,185; 5,171,678; WO 94/00569; WO 93/24640; WO 91/16024; Felgner, (1994) J. Biol. Chem. 269:2550; Nabel, (1993) Proc. Natl. Acad. Sci. 90:11307; Nabel, (1992) Human Gene Ther. 3:649; Gershon, (1993) Biochem. 32:7143; and Strauss, (1992) EMBO J. 11:417.

[0856] Non-ionic liposomal systems have also been examined to determine their utility in the delivery of drugs to the skin, in particular systems comprising non-ionic surfactant and cholesterol. Non-ionic liposomal formulations comprising Novasome™ I (glyceryl dilaurate/cholesterol/polyoxyethylene-10-stearyl ether) and Novasome™ II (glyceryl distearate/cholesterol/polyoxyethylene-10-stearyl ether) were used to deliver cyclosporin-A into the dermis of mouse skin. Results indicated that such non-ionic liposomal systems were effective in facilitating the deposition of cyclosporine A into different layers of the skin (Hu et al., (1994) S.T.P.Pharma. Sci., 4(6):466).

[0857] Liposomes also include “sterically stabilized” liposomes, a term which, as used herein, refers to liposomes comprising one or more specialized lipids that, when incorporated into liposomes, result in enhanced circulation lifetimes relative to liposomes lacking such specialized lipids. Examples of sterically stabilized liposomes are those in which part of the vesicle-forming lipid portion of the liposome (A) comprises one or more glycolipids, such as monosialoganglioside G_{MI}, or (B) is derivatized with one or more hydrophilic polymers, such as a polyethylene glycol (PEG) moiety. While not wishing to be bound by any particular theory, it is thought in the art that, at least for sterically stabilized liposomes containing gangliosides, sphingomyelin, or PEG-derivatized lipids, the enhanced circulation half-life of these sterically stabilized liposomes derives from a reduced uptake into cells of the reticuloendothelial system (RES) (Allen et al., (1987) FEBS Letters, 223:42; Wu et al., (1993) Cancer Research, 53:3765).

[0858] Various liposomes comprising one or more glycolipids are known in the art. Papahadjopoulos et al. (Ann. N.Y. Acad. Sci., (1987), 507:64) reported the ability of monosialoganglioside GMI, galactocerebroside sulfate and phosphatidylinositol to improve blood half-lives of liposomes. These findings were expounded upon by Gabizon et al. (Proc. Natl. Acad. Sci. U.S.A., (1988), 85,:6949). U.S. Pat. No. 4,837,028 and WO 88/04924, both to Allen et al., disclose liposomes comprising (1) sphingomyelin and (2) the ganglioside Gi or a galactocerebroside sulfate ester. U.S. Pat. No. 5,543,152 (Webb et al.) discloses liposomes comprising sphingomyelin. Liposomes comprising 1,2-sn-dimyristoylphosphatidylcholine are disclosed in WO 97/13499 (Lim et al).

[0859] In one embodiment, cationic liposomes are used. Cationic liposomes possess the advantage of being able to fuse to the cell membrane. Non-cationic liposomes, although not able to fuse as efficiently with the plasma membrane, are taken up by macrophages in vivo and can be used to deliver RNAi agents to macrophages.

[0860] Further advantages of liposomes include: liposomes obtained from natural phospholipids are biocompatible and biodegradable; liposomes can incorporate a wide range of water and lipid soluble drugs; liposomes can protect encapsulated RNAi agents in their internal compartments from metabolism and degradation (Rosoff, in “Pharmaceutical Dosage Forms,” Lieberman, Rieger and Banker (Eds.), 1988, volume 1, p. 245). Important considerations in the preparation of liposome formulations are the lipid surface charge, vesicle size and the aqueous volume of the liposomes.

[0861] A positively charged synthetic cationic lipid, N-[1-(2,3-dioleyloxy)propyl]-N,N,N-trimethylammonium chloride (DOTMA) can be used to form small liposomes that interact spontaneously with nucleic acid to form lipid-nucleic acid complexes which are capable of fusing with the negatively charged lipids of the cell membranes of tissue culture cells, resulting in delivery of RNAi agent (see, e.g., Felgner, P. L. et al., (1987) Proc. Natl. Acad. Sci. USA 8:7413-7417, and U.S. Pat. No. 4,897,355 for a description of DOTMA and its use with DNA).

[0862] A DOTMA analogue. 1,2-bis(olcoyloxy)-3-(trimethylammonia)propane (DOTAP) can be used in combination with a phospholipid to form DNA-complexing vesicles. Lipofectin™ Bethesda Research Laboratories, Gaithersburg, Md.) is an effective agent for the delivery of highly anionic nucleic acids into living tissue culture cells that comprise positively charged DOTMA liposomes which interact spontaneously with negatively charged polynucleotides to form complexes. When enough positively charged liposomes are used, the net charge on the resulting complexes is also positive. Positively charged complexes prepared in this way spontaneously attach to negatively charged cell surfaces, fuse with the plasma membrane, and efficiently deliver functional nucleic acids into, for example, tissue culture cells. Another commercially available cationic lipid, 1,2-bis(olcoyloxy)-3.3-(trimethylammonia)propane (“DOTAP”) (Bochringer Mannheim, Indianapolis, Indiana) differs from DOTMA in that the oleoyl moieties are linked by ester, rather than ether linkages.

[0863] Other reported cationic lipid compounds include those that have been conjugated to a variety of moieties including, for example, carboxyspermine which has been conjugated to one of two types of lipids and includes compounds such as 5-carboxyspermylglycine dioctaoleoylamide (“DOGS”) (Transfectam™, Promega, Madison, Wisconsin) and dipalmitoylphosphatidylethanolamine 5-carboxyspermyl-amide (“DPPES”) (sec, e.g., U.S. Pat. No. 5,171,678).

[0864] Another cationic lipid conjugate includes derivatization of the lipid with cholesterol (“DC-Chol”) which has been formulated into liposomes in combination with DOPE (Sec, Gao, X. and Huang. L., (1991) Biochim. Biophys. Res. Commun. 179:280). Lipopolylysine, made by conjugating polylysine to DOPE, has been reported to be effective for transfection in the presence of serum (Zhou, X. et al., (1991) Biochim. Biophys. Acta 1065:8). For certain cell lines, these liposomes containing conjugated cationic lipids, are said to exhibit lower toxicity and provide more efficient transfection than the DOTMA-containing compositions. Other commercially available cationic lipid products include DMRIE and DMRIE-HP (Vical, La Jolla, California) and Lipofectamine (DOSPA) (Life Technology, Inc., Gaithersburg, Maryland). Other cationic lipids suitable for the delivery of oligonucleotides are described in WO 98/39359 and WO 96/37194.

[0865] Liposomal formulations are particularly suited for topical administration, liposomes present several advantages over other formulations. Such advantages include reduced side effects related to high systemic absorption of the administered drug, increased accumulation of the administered drug at the desired target, and the ability to administer RNAi agent into the skin. In some implementations, liposomes are used for delivering RNAi agent to epidermal cells and also to enhance the penetration of RNAi agent into dermal tissues, e.g., into skin. For example, the liposomes can be applied topically. Topical delivery of drugs formulated as liposomes to the skin has been documented (sec, e.g., Weiner et al., (1992) Journal of Drug Targeting, vol. 2,405-410 and du Plessis et al., (1992) Antiviral Research, 18:259-265; Mannino, R. J. and Fould-Fogerite, S., (1998) Biotechniques 6:682-690; Itani, T. et al., (1987) Gene 56:267-276; Nicolau, C. et al. (1987) Meth. Enzymol. 149:157-176; Straubinger, R. M. and Papahadjopoulos, D. (1983) Meth. Enzymol. 101:512-527; Wang. C. Y. and Huang. L., (1987) Proc. Natl. Acad. Sci. USA 84:7851-7855).

[0866] Non-ionic liposomal systems have also been examined to determine their utility in the delivery of drugs to the skin, in particular systems comprising non-ionic surfactant and cholesterol. Non-ionic liposomal formulations comprising Novasome I (glyceryl dilaurate/cholesterol/polyoxyethylene-10-stearyl ether) and Novasome II (glyceryl distearate/cholesterol/polyoxyethylene-10-stearyl ether) were used to deliver a drug into the dermis of mouse skin. Such formulations with RNAi agent are useful for treating a dermatological disorder.

[0867] Liposomes that include RNAi agents can be made highly deformable. Such deformability can enable the liposomes to penetrate through pore that are smaller than the average radius of the liposome. For example, transfersomes are a type of deformable liposomes. Transferosomes can be made by adding surface edge activators, usually surfactants, to a standard liposomal composition. Transfersomes that include RNAi agent can be delivered, for example, subcutaneously by infection in order to deliver RNAi agent to keratinocytes in the skin. In order to cross intact mammalian skin, lipid vesicles must pass through a series of fine pores, each with a diameter less than 50 nm, under the influence of a suitable transdermal gradient. In addition, due to the lipid properties, these transferosomes can be self-optimizing (adaptive to the shape of pores, e.g., in the skin), self-repairing, and can frequently reach their targets without fragmenting, and often self-loading.

[0868] Other formulations amenable to the present disclosure are described in U.S. provisional application Ser. No. 61/018,616, filed Jan. 2, 2008; 61/018,611, filed Jan. 2, 2008; 61/039.748, filed Mar. 26, 2008; 61/047,087, filed Apr. 22, 2008 and 61/051,528, filed May 8, 2008. PCT application number PCT/US2007/080331, filed Oct. 3, 2007, also describes formulations that are amenable to the present disclosure.

[0869] Transfersomes, yet another type of liposomes, are highly deformable lipid aggregates which are attractive candidates for drug delivery vehicles. Transfersomes can be described as lipid droplets which are so highly deformable that they are easily able to penetrate through pores which are smaller than the droplet. Transfersomes are adaptable to the environment in which they are used, e.g., they are self-optimizing (adaptive to the shape of pores in the skin), self-repairing, frequently reach their targets without fragmenting, and often self-loading. To make transfersomes it is possible to add surface edge-activators, usually surfactants, to a standard liposomal composition. Transfersomes have been used to deliver serum albumin to the skin. The transfersome-mediated delivery of serum albumin has been shown to be as effective as subcutaneous injection of a solution containing serum albumin. Surfactants find wide application in formulations such as those described herein, particularlay in emulsions (including microemulsions) and liposomes. The most common way of classifying and ranking the properties of the many different types of surfactants, both natural and synthetic, is by the use of the hydrophile/lipophile balance (HLB). The nature of the hydrophilic group (also known as the “head”) provides the most useful means for categorizing the different surfactants used in formulations (Rieger, in Pharmaceutical Dosage Forms, Marcel Dekker, Inc., New York, N.Y., 1988, p. 285).

[0870] If the surfactant molecule is not ionized, it is classified as a nonionic surfactant. Nonionic surfactants find wide application in pharmaceutical and cosmetic products and are usable over a wide range of pH values. In general, their HLB values range from 2 to about 18 depending on their structure. Nonionic surfactants include nonionic esters such as ethylene glycol esters, propylene glycol esters, glyceryl esters, polyglyceryl esters, sorbitan esters, sucrose esters, and ethoxylated esters. Nonionic alkanolamides and ethers such as fatty alcohol ethoxylates, propoxylated alcohols, and ethoxylated/propoxylated block polymers are also included in this class. The polyoxyethylene surfactants are the most popular members of the nonionic surfactant class.

[0871] If the surfactant molecule carries a negative charge when it is dissolved or dispersed in water, the surfactant is classified as anionic. Anionic surfactants include carboxylates such as soaps, acyl lactylates, acyl amides of amino acids, esters of sulfuric acid such as alkyl sulfates and ethoxylated alkyl sulfates, sulfonates such as alkyl benzene sulfonates, acyl isethionates, acyl taurates and sulfosuccinates, and phosphates. The most important members of the anionic surfactant class are the alkyl sulfates and the soaps.

[0872] If the surfactant molecule carries a positive charge when it is dissolved or dispersed in water, the surfactant is classified as cationic. Cationic surfactants include quaternary ammonium salts and ethoxylated amines. The quaternary ammonium salts are the most used members of this class.

[0873] If the surfactant molecule has the ability to carry either a positive or negative charge, the surfactant is classified as amphoteric. Amphoteric surfactants include acrylic acid derivatives, substituted alkylamides, N-alkylbetaines and phosphatides. The use of surfactants in drug products, formulations and in emulsions has been reviewed (Rieger, in Pharmaceutical Dosage Forms, Marcel Dekker, Inc., New York, N.Y., 1988, p. 285).

[0874] The RNAi agent for use in the methods of the disclosure can also be provided as micellar formulations. “Micelles” are defined herein as a particular type of molecular assembly in which amphipathic molecules are arranged in a spherical structure such that all the hydrophobic portions of the molecules are directed inward, leaving the hydrophilic portions in contact with the surrounding aqueous phase. The converse arrangement exists if the environment is hydrophobic.

[0875] A mixed micellar formulation suitable for delivery through transdermal membranes may be prepared by mixing an aqueous solution of the siRNA composition, an alkali metal C₈ to C22 alkyl sulphate, and a micelle forming compounds. Exemplary micelle forming compounds include lecithin, hyaluronic acid, pharmaceutically acceptable salts of hyaluronic acid, glycolic acid, lactic acid, chamomile extract, cucumber extract, oleic acid, linoleic acid, linolenic acid, monoolein, monooleates, monolaurates, borage oil, evening of primrose oil, menthol, trihydroxy oxo cholanyl glycine and pharmaceutically acceptable salts thereof, glycerin, polyglycerin, lysine, polylysine, triolein, polyoxyethylene ethers and analogues thereof, polidocanol alkyl ethers and analogues thereof, chenodeoxycholate, deoxycholate, and mixtures thereof. The micelle forming compounds may be added at the same time or after addition of the alkali metal alkyl sulphate. Mixed micelles will form with substantially any kind of mixing of the ingredients but vigorous mixing in order to provide smaller size micelles.

[0876] In one method a first micellar composition is prepared which contains the siRNA composition and at least the alkali metal alkyl sulphate. The first micellar composition is then mixed with at least three micelle forming compounds to form a mixed micellar composition. In another method, the micellar composition is prepared by mixing the siRNA composition, the alkali metal alkyl sulphate and at least one of the micelle forming compounds, followed by addition of the remaining micelle forming compounds, with vigorous mixing.

[0877] Phenol or m-cresol may be added to the mixed micellar composition to stabilize the formulation and protect against bacterial growth. Alternatively, phenol or m-cresol may be added with the micelle forming ingredients. An isotonic agent such as glycerin may also be added after formation of the mixed micellar composition.

[0878] For delivery of the micellar formulation as a spray, the formulation can be put into an aerosol dispenser and the dispenser is charged with a propellant. The propellant, which is under pressure, is in liquid form in the dispenser. The ratios of the ingredients are adjusted so that the aqueous and propellant phases become one, i.e., there is one phase. If there are two phases, it is necessary to shake the dispenser prior to dispensing a portion of the contents, e.g., through a metered valve. The dispensed dose of pharmaceutical agent is propelled from the metered valve in a fine spray.

[0879] Propellants may include hydrogen-containing chlorofluorocarbons, hydrogen-containing fluorocarbons, dimethyl ether and diethyl ether. In certain embodiments, HFA 134a (1,1,1,2 tetrafluoroethane) may be used.

[0880] The specific concentrations of the essential ingredients can be determined by relatively straightforward experimentation. For absorption through the oral cavities, it is often desirable to increase, e.g., at least double or triple, the dosage for through injection or administration through the gastrointestinal tract.

### B. Lipid Particles

[0881] RNAi agents, e.g., dsRNAs of in the disclosure may be fully encapsulated in a lipid formulation, e.g., a LNP, or other nucleic acid-lipid particle.

[0882] As used herein, the term “LNP” refers to a stable nucleic acid-lipid particle. LNPs typically contain a cationic lipid, a non-cationic lipid, and a lipid that prevents aggregation of the particle (e.g., a PEG-lipid conjugate). LNPs are extremely useful for systemic applications, as they exhibit extended circulation lifetimes following intravenous (i.v.) injection and accumulate at distal sites (e.g., sites physically separated from the administration site). LNPs include “pSPLP,” which include an encapsulated condensing agent-nucleic acid complex as set forth in WO 00/03683. The particles of the present disclosure typically have a mean diameter of about 50 nm to about 150 nm, more typically about 60 nm to about 130 nm, more typically about 70 nm to about 110 nm, most typically about 70 nm to about 90 nm, and are substantially nontoxic. In addition, the nucleic acids when present in the nucleic acid-lipid particles of the present disclosure are resistant in aqueous solution to degradation with a nuclease. Nucleic acid-lipid particles and their method of preparation are disclosed in, e.g., U.S. Pat. Nos. 5,976,567; 5,981,501; 6,534,484; 6,586,410; 6,815,432; United States Patent publication No. 2010/0324120 and WO 96/40964.

[0883] In one embodiment, the lipid to drug ratio (mass/mass ratio) (e.g., lipid to dsRNA ratio) will be in the range of from about 1:1 to about 50:1, from about 1:1 to about 25:1, from about 3:1 to about 15:1, from about 4:1 to about 10:1, from about 5:1 to about 9:1, or about 6:1 to about 9:1. Ranges intermediate to the above recited ranges are also contemplated to be part of the disclosure.

[0884] Certain specific LNP formulations for delivery of RNAi agents have been described in the art, including, e.g., “LNP01” formulations as described in, e.g., WO 2008/042973, which is hereby incorporated by reference.

[0885] Additional exemplary lipid-dsRNA formulations are identified in the below.

| | | cationic lipid/non-cationic |
|---|---|---|
| | | lipid/cholesterol/PEG-lipid conjugate |
| | Ionizable/Cationic Lipid | Lipid:siRNA ratio |
| SNALP-1 | 1,2-Dilinolenyloxy-N,N- | DLinDMA/DPPC/holesterol/PEG- |
| | dimethylaminopropane (DLinDMA) | cDMA |
| | | (57.1/7.1/34.4/1.4) |
| | | lipid:siRNA ~7:1 |
| 2-XTC | 2,2-Dilinoleyl-4-dimethylaminoethyl-[1,3]- | XTC/DPPC/Cholesterol/PEG-cDMA |
| | dioxolane (XTC) | 57.1/7.1/34.4/1.4 |
| | | lipid:siRNA ~7:1 |
| LNP05 | 2,2-Dilinoleyl-4-dimethylaminoethyl-[1,3]- | XTC/DSPC/Cholesterol/PEG-DMG |
| | dioxolane (XTC) | 57.5/7.5/31.5/3.5 |
| | | lipid:siRNA ~6:1 |
| LNP06 | 2,2-Dilinoleyl-4-dimethylaminoethyl-[1,3]- | XTC/DSPC/Cholesterol/PEG-DMG |
| | dioxolane (XTC) | 57.5/7.5/31.5/3.5 |
| | | lipid:siRNA ~11:1 |
| LNP07 | 2,2-Dilinoleyl-4-dimethylaminoethyl-[1,3]- | XTC/DSPC/Cholesterol/PEG-DMG |
| | dioxolane (XTC) | 60/7.5/31/1.5, |
| | | lipid:siRNA ~6:1 |
| LNP08 | 2,2-Dilinoleyl-4-dimethylaminoethyl-[1,3]- | XTC/DSPC/Cholesterol/PEG-DMG |
| | dioxolane (XTC) | 60/7.5/31/1.5, |
| | | lipid:siRNA ~11:1 |
| LNP09 | 2,2-Dilinoleyl-4-dimethylaminoethyl-[1,3]- | XTC/DSPC/Cholesterol/PEG-DMG |
| | dioxolane (XTC) | 50/10/38.5/1.5 |
| | | Lipid:siRNA 10:1 |
| LNP10 | (3aR,5s,6aS)-N,N-dimethyl-2,2- | ALN100/DSPC/Cholesterol/PEG- |
| | di((9Z,12Z)-octadeca-9,12- | DMG |
| | dienyl)tetrahydro-3aH- | 50/10/38.5/1.5 |
| | cyclopenta[d][1,3]dioxol-5-amine | Lipid:siRNA 10:1 |
| | (ALN100) | |
| LNP11 | (6Z,9Z,28Z,31Z)-heptatriaconta-6,9,28,31- | MC-3/DSPC/Cholesterol/PEG-DMG |
| | tetraen-19-yl 4-(dimethylamino)butanoate | 50/10/38.5/1.5 |
| | (MC3) | Lipid:siRNA 10:1 |
| LNP12 | 1,1′-(2-(4-(2-((2-(bis(2- | Tech G1/DSPC/Cholesterol/PEG- |
| | hydroxydodecyl)amino)ethyl)(2- | DMG |
| | hydroxydodecyl)amino)ethyl)piperazin-1- | 50/10/38.5/1.5 |
| | yl)ethylazanediyl)didodecan-2-ol (Tech | Lipid:siRNA 10:1 |
| | G1) | |
| LNP13 | XTC | XTC/DSPC/Chol/PEG-DMG |
| | | 50/10/38.5/1.5 |
| | | Lipid:siRNA: 33:1 |
| LNP14 | MC3 | MC3/DSPC/Chol/PEG-DMG |
| | | 40/15/40/5 |
| | | Lipid:siRNA: 11:1 |
| LNP15 | MC3 | MC3/DSPC/Chol/PEG-DSG/GalNAc- |
| | | PEG-DSG |
| | | 50/10/35/4.5/0.5 |
| | | Lipid:siRNA: 11:1 |
| LNP16 | MC3 | MC3/DSPC/Chol/PEG-DMG |
| | | 50/10/38.5/1.5 |
| | | Lipid:siRNA: 7:1 |
| LNP17 | MC3 | MC3/DSPC/Chol/PEG-DSG |
| | | 50/10/38.5/1.5 |
| | | Lipid:siRNA: 10:1 |
| LNP18 | MC3 | MC3/DSPC/Chol/PEG-DMG |
| | | 50/10/38.5/1.5 |
| | | Lipid:siRNA: 12:1 |
| LNP19 | MC3 | MC3/DSPC/Chol/PEG-DMG |
| | | 50/10/35/5 |
| | | Lipid:siRNA: 8:1 |
| LNP20 | MC3 | MC3/DSPC/Chol/PEG-DPG |
| | | 50/10/38.5/1.5 |
| | | Lipid:siRNA: 10:1 |
| LNP21 | C12-200 | C12-200/DSPC/Chol/PEG-DSG |
| | | 50/10/38.5/1.5 |
| | | Lipid:siRNA: 7:1 |
| LNP22 | XTC | XTC/DSPC/Chol/PEG-DSG |
| | | 50/10/38.5/1.5 |
| | | Lipid:siRNA: 10:1 |

DSPC: distearoylphosphatidylcholine
DPPC: dipalmitoylphosphatidylcholine
PEG-DMG: PEG-didimyristoyl glycerol (C14-PEG, or PEG-C14) (PEG with avg mol wt of 2000)
PEG-DSG: PEG-distyryl glycerol (C18-PEG, or PEG-C18) (PEG with avg mol wt of 2000)
PEG-cDMA: PEG-carbamoyl-1,2-dimyristyloxypropylamine (PEG with avg mol wt of 2000)
SNALP (1,2-Dilinolenyloxy-N,N-dimethylaminopropane (DLinDMA)) comprising formulations are described in WO 2009/127060, which is hereby incorporated by reference.
XTC comprising formulations are described in WO 2010/088537, the entire contents of which are hereby incorporated herein by reference.
MC3 comprising formulations are described, e.g., in United States Patent Publication No. 2010/0324120, the entire contents of which are hereby incorporated by reference.
ALNY-100 comprising formulations are described in WO 2010/054406, the entire contents of which are hereby incorporated herein by reference.
C12-200 comprising formulations are described in WO 2010/129709, the entire contents of which are hereby incorporated herein by reference.

[0886] Compositions and formulations for oral administration include powders or granules, microparticulates, nanoparticulates, suspensions or solutions in water or non-aqueous media, capsules, gel capsules, sachets, tablets or minitablets. Thickeners, flavoring agents, diluents, emulsifiers, dispersing aids or binders can be desirable. In some embodiments, oral formulations are those in which dsRNAs featured in the disclosure are administered in conjunction with one or more penetration enhancer surfactants and chelators. Suitable surfactants include fatty acids or esters or salts thereof, bile acids or salts thereof. Suitable bile acids/salts include chenodeoxycholic acid (CDCA) and ursodeoxychenodeoxycholic acid (UDCA), cholic acid, dehydrocholic acid, deoxycholic acid, glucholic acid, glycholic acid, glycodeoxycholic acid, taurocholic acid, taurodeoxycholic acid, sodium tauro-24,25-dihydro-fusidate and sodium glycodihydrofusidate. Suitable fatty acids include arachidonic acid, undecanoic acid, oleic acid, lauric acid, caprylic acid, capric acid, myristic acid, palmitic acid, stearic acid, linoleic acid, linolenic acid, dicaprate, tricaprate, monoolein, dilaurin, glyceryl 1-monocaprate, 1-dodecylazacycloheptan-2-one, an acylcarnitine, an acylcholine, or a monoglyceride, a diglyceride or a pharmaceutically acceptable salt thereof (e.g., sodium). In some embodiments, combinations of penetration enhancers are used, for example, fatty acids/salts in combination with bile acids/salts. One exemplary combination is the sodium salt of lauric acid, capric acid and UDCA. Further penetration enhancers include polyoxyethylene-9-lauryl ether, polyoxyethylene-20-cetyl ether. DsRNAs featured in the disclosure can be delivered orally, in granular form including sprayed dried particles, or complexed to form micro or nanoparticles. DsRNA complexing agents include poly-amino acids; polyimines; polyacrylates; polyalkylacrylates, polyoxethanes, polyalkylcyanoacrylates; cationized gelatins, albumins, starches, acrylates, polyethyleneglycols (PEG) and starches; polyalkylcyanoacrylates; DEAE-derivatized polyimines, pollulans, celluloses and starches. Suitable complexing agents include chitosan, N-trimethylchitosan, poly-L-lysine, polyhistidine, polyornithine, polyspermines, protamine, polyvinylpyridine, polythiodiethylaminomethylethylene P(TDAE), polyaminostyrene (e.g., p-amino), poly(methylcyanoacrylate), poly(ethylcyanoacrylate), poly(butylcyanoacrylate), poly(isobutylcyanoacrylate), poly(isohexylcynaoacrylate), DEAE-methacrylate, DEAE-hexylacrylate, DEAE-acrylamide, DEAE-albumin and DEAE-dextran, polymethylacrylate, polyhexylacrylate, poly(D,L-lactic acid), poly(DL-lactic-co-glycolic acid (PLGA), alginate, and polyethyleneglycol (PEG). Oral formulations for dsRNAs and their preparation are described in detail in U.S. Pat. No. 6,887,906, U.S. 2003/0027780, and U.S. Pat. No. 6,747,014, each of which is incorporated herein by reference.

[0887] Compositions and formulations for parenteral, intraparenchymal (into the brain), intrathecal, intraventricular or intrahepatic administration can include sterile aqueous solutions which can also contain buffers, diluents and other suitable additives such as, but not limited to, penetration enhancers, carrier compounds and other pharmaceutically acceptable carriers or excipients.

[0888] Pharmaceutical compositions of the present disclosure include, but are not limited to, solutions, emulsions, and liposome-containing formulations. These compositions can be generated from a variety of components that include, but are not limited to, preformed liquids, self-emulsifying solids and self-emulsifying semisolids. Particularly preferred are formulations that target the brain when treating APP-associated diseases or disorders.

[0889] The pharmaceutical formulations of the present disclosure, which can conveniently be presented in unit dosage form, can be prepared according to conventional techniques well known in the pharmaceutical industry. Such techniques include the step of bringing into association the active ingredients with the pharmaceutical carrier(s) or excipient(s). In general, the formulations are prepared by uniformly and intimately bringing into association the active ingredients with liquid carriers or finely divided solid carriers or both, and then, if necessary, shaping the product.

[0890] The compositions of the present disclosure can be formulated into any of many possible dosage forms such as, but not limited to, tablets, capsules, gel capsules, liquid syrups, soft gels, suppositories, and enemas. The compositions of the present disclosure can also be formulated as suspensions in aqueous, non-aqueous or mixed media. Aqueous suspensions can further contain substances which increase the viscosity of the suspension including, for example, sodium carboxymethylcellulose, sorbitol or dextran. The suspension can also contain stabilizers.

### C. Additional Formulations

[0891] i. Emulsions

[0892] The compositions of the present disclosure can be prepared and formulated as emulsions. Emulsions are typically heterogeneous systems of one liquid dispersed in another in the form of droplets usually exceeding 0.1 μm in diameter (see e.g., Ansel's Pharmaceutical Dosage Forms and Drug Delivery Systems, Allen, LV., Popovich NG., and Ansel HC., 2004, Lippincott Williams & Wilkins (8th ed.), New York, NY; Idson, in Pharmaceutical Dosage Forms, Lieberman, Rieger and Banker (Eds.), 1988, Marcel Dekker, Inc., New York, N.Y., volume 1, p. 199; Rosoff, in Pharmaceutical Dosage Forms, Lieberman, Rieger and Banker (Eds.), 1988, Marcel Dekker, Inc., New York, N.Y., Volume 1, p. 245; Block in Pharmaceutical Dosage Forms, Lieberman, Rieger and Banker (Eds.), 1988, Marcel Dekker, Inc., New York, N.Y., volume 2, p. 335; Higuchi et al., in Remington's Pharmaceutical Sciences, Mack Publishing Co., Easton, Pa., 1985, p. 301). Emulsions are often biphasic systems comprising two immiscible liquid phases intimately mixed and dispersed with each other. In general, emulsions can be of either the water-in-oil (w/o) or the oil-in-water (o/w) variety. When an aqueous phase is finely divided into and dispersed as minute droplets into a bulk oily phase, the resulting composition is called a water-in-oil (w/o) emulsion. Alternatively, when an oily phase is finely divided into and dispersed as minute droplets into a bulk aqueous phase, the resulting composition is called an oil-in-water (o/w) emulsion. Emulsions can contain additional components in addition to the dispersed phases, and the active drug which can be present as a solution in cither aqueous phase, oily phase or itself as a separate phase. Pharmaceutical excipients such as emulsifiers, stabilizers, dyes, and anti-oxidants can also be present in emulsions as needed. Pharmaceutical emulsions can also be multiple emulsions that are comprised of more than two phases such as, for example, in the case of oil-in-water-in-oil (o/w/o) and water-in-oil-in-water (w/o/w) emulsions. Such complex formulations often provide certain advantages that simple binary emulsions do not. Multiple emulsions in which individual oil droplets of an o/w emulsion enclose small water droplets constitute a w/o/w emulsion. Likewise, a system of oil droplets enclosed in globules of water stabilized in an oily continuous phase provides an o/w/o emulsion.

[0893] Emulsions are characterized by little or no thermodynamic stability. Often, the dispersed or discontinuous phase of the emulsion is well dispersed into the external or continuous phase and maintained in this form through the means of emulsifiers or the viscosity of the formulation. Either of the phases of the emulsion can be a semisolid or a solid, as is the case of emulsion-style ointment bases and creams. Other means of stabilizing emulsions entail the use of emulsifiers that can be incorporated into either phase of the emulsion. Emulsifiers can broadly be classified into four categories: synthetic surfactants, naturally occurring emulsifiers, absorption bases, and finely dispersed solids (see e.g., Ansel's Pharmaceutical Dosage Forms and Drug Delivery Systems, Allen, LV., Popovich NG., and Ansel HC., 2004, Lippincott Williams & Wilkins (8th ed.), New York, NY; Idson, in Pharmaceutical Dosage Forms, Lieberman, Rieger and Banker (Eds.), 1988, Marcel Dekker, Inc., New York, N.Y., volume 1, p. 199).

[0894] Synthetic surfactants, also known as surface active agents, have found wide applicability in the formulation of emulsions and have been reviewed in the literature (see e.g., Ansel's Pharmaceutical Dosage Forms and Drug Delivery Systems, Allen, LV., Popovich NG., and Ansel HC., 2004, Lippincott Williams & Wilkins (8th ed.), New York, NY; Rieger, in Pharmaceutical Dosage Forms, Lieberman, Rieger and Banker (Eds.), 1988, Marcel Dekker, Inc., New York, N. Y., volume 1, p. 285; Idson, in Pharmaceutical Dosage Forms, Lieberman, Rieger and Banker (Eds.), Marcel Dekker, Inc., New York, N.Y., 1988, volume 1, p. 199). Surfactants are typically amphiphilic and comprise a hydrophilic and a hydrophobic portion. The ratio of the hydrophilic to the hydrophobic nature of the surfactant has been termed the hydrophile/lipophile balance (HLB) and is a valuable tool in categorizing and selecting surfactants in the preparation of formulations. Surfactants can be classified into different classes based on the nature of the hydrophilic group: nonionic, anionic, cationic and amphoteric (see e.g., Ansel's Pharmaceutical Dosage Forms and Drug Delivery Systems, Allen, LV., Popovich NG., and Ansel HC., 2004, Lippincott Williams & Wilkins (8th ed.), New York, NY Rieger, in Pharmaceutical Dosage Forms, Lieberman, Rieger and Banker (Eds.), 1988, Marcel Dekker, Inc., New York, N.Y., volume 1, p. 285).

[0895] Naturally occurring emulsifiers used in emulsion formulations include lanolin, beeswax, phosphatides, lecithin and acacia. Absorption bases possess hydrophilic properties such that they can soak up water to form w/o emulsions yet retain their semisolid consistencies, such as anhydrous lanolin and hydrophilic petrolatum. Finely divided solids have also been used as good emulsifiers especially in combination with surfactants and in viscous preparations. These include polar inorganic solids, such as heavy metal hydroxides, nonswelling clays such as bentonite, attapulgite, hectorite, kaolin, montmorillonite, colloidal aluminum silicate and colloidal magnesium aluminum silicate, pigments and nonpolar solids such as carbon or glyceryl tristearate.

[0896] A large variety of non-emulsifying materials are also included in emulsion formulations and contribute to the properties of emulsions. These include fats, oils, waxes, fatty acids, fatty alcohols, fatty esters, humectants, hydrophilic colloids, preservatives and antioxidants (Block, in Pharmaceutical Dosage Forms, Lieberman, Rieger and Banker (Eds.), 1988, Marcel Dekker, Inc., New York, N.Y., volume 1, p. 335; Idson, in Pharmaceutical Dosage Forms, Lieberman, Rieger and Banker (Eds.), 1988, Marcel Dekker, Inc., New York, N.Y., volume 1, p. 199).

[0897] Hydrophilic colloids or hydrocolloids include naturally occurring gums and synthetic polymers such as polysaccharides (for example, acacia, agar, alginic acid, carrageenan, guar gum, karaya gum, and tragacanth), cellulose derivatives (for example, carboxymethylcellulose and carboxypropylcellulose), and synthetic polymers (for example, carbomers, cellulose ethers, and carboxyvinyl polymers). These disperse or swell in water to form colloidal solutions that stabilize emulsions by forming strong interfacial films around the dispersed-phase droplets and by increasing the viscosity of the external phase.

[0898] Since emulsions often contain a number of ingredients such as carbohydrates, proteins, sterols and phosphatides that can readily support the growth of microbes, these formulations often incorporate preservatives. Commonly used preservatives included in emulsion formulations include methyl paraben, propyl paraben, quaternary ammonium salts, benzalkonium chloride, esters of p-hydroxybenzoic acid, and boric acid. Antioxidants are also commonly added to emulsion formulations to prevent deterioration of the formulation. Antioxidants used can be free radical scavengers such as tocopherols, alkyl gallates, butylated hydroxyanisole, butylated hydroxytoluene, or reducing agents such as ascorbic acid and sodium metabisulfite, and antioxidant synergists such as citric acid, tartaric acid, and lecithin.

[0899] The application of emulsion formulations via dermatological, oral and parenteral routes and methods for their manufacture have been reviewed in the literature (see e.g., Ansel's Pharmaceutical Dosage Forms and Drug Delivery Systems, Allen, LV., Popovich NG., and Ansel HC., 2004, Lippincott Williams & Wilkins (8th ed.), New York, NY; Idson, in Pharmaceutical Dosage Forms, Lieberman, Rieger and Banker (Eds.), 1988, Marcel Dekker, Inc., New York, N. Y., volume 1, p. 199). Emulsion formulations for oral delivery have been very widely used because of case of formulation, as well as efficacy from an absorption and bioavailability standpoint (see e.g., Ansel's Pharmaceutical Dosage Forms and Drug Delivery Systems, Allen, LV., Popovich NG., and Ansel HC., 2004, Lippincott Williams & Wilkins (8th ed.), New York, NY; Rosoff, in Pharmaceutical Dosage Forms, Lieberman, Rieger and Banker (Eds.), 1988, Marcel Dekker, Inc., New York, N.Y., volume 1, p. 245; Idson, in Pharmaceutical Dosage Forms, Lieberman, Rieger and Banker (Eds.), 1988, Marcel Dekker, Inc., New York, N.Y., volume 1, p. 199). Mineral-oil base laxatives, oil-soluble vitamins and high fat nutritive preparations are among the materials that have commonly been administered orally as o/w emulsions.

ii. Microemulsions

[0900] In one embodiment of the present disclosure, the compositions of RNAi agents and nucleic acids are formulated as microemulsions. A microemulsion can be defined as a system of water, oil and amphiphile which is a single optically isotropic and thermodynamically stable liquid solution (sec e.g., Ansel's Pharmaceutical Dosage Forms and Drug Delivery Systems, Allen, LV., Popovich NG., and Ansel HC., 2004, Lippincott Williams & Wilkins (8th ed.), New York, NY; Rosoff, in Pharmaceutical Dosage Forms, Lieberman, Rieger and Banker (Eds.), 1988, Marcel Dekker, Inc., New York, N.Y., volume 1, p. 245). Typically, microemulsions are systems that are prepared by first dispersing an oil in an aqueous surfactant solution and then adding a sufficient amount of a fourth component, generally an intermediate chain-length alcohol to form a transparent system. Therefore, microemulsions have also been described as thermodynamically stable, isotropically clear dispersions of two immiscible liquids that are stabilized by interfacial films of surface-active molecules (Leung and Shah, in: Controlled Release of Drugs: Polymers and Aggregate Systems, Rosoff, M., Ed., 1989, VCH Publishers, New York, pages 185-215). Microemulsions commonly are prepared via a combination of three to five components that include oil, water, surfactant, cosurfactant and electrolyte. Whether the microemulsion is of the water-in-oil (w/o) or an oil-in-water (o/w) type is dependent on the properties of the oil and surfactant used, and on the structure and geometric packing of the polar heads and hydrocarbon tails of the surfactant molecules (Schott, in Remington's Pharmaceutical Sciences, Mack Publishing Co., Easton, Pa., 1985, p. 271).

[0901] The phenomenological approach utilizing phase diagrams has been extensively studied and has yielded a comprehensive knowledge, to one skilled in the art, of how to formulate microemulsions (see e.g., Ansel's Pharmaceutical Dosage Forms and Drug Delivery Systems, Allen, LV., Popovich NG., and Ansel HC., 2004, Lippincott Williams & Wilkins (8th ed.), New York, NY; Rosoff, in Pharmaceutical Dosage Forms, Lieberman, Rieger and Banker (Eds.), 1988, Marcel Dekker, Inc., New York, N.Y., volume 1, p. 245; Block, in Pharmaceutical Dosage Forms, Lieberman, Rieger and Banker (Eds.), 1988, Marcel Dekker, Inc., New York, N.Y., volume 1, p. 335). Compared to conventional emulsions, microemulsions offer the advantage of solubilizing water-insoluble drugs in a formulation of thermodynamically stable droplets that are formed spontaneously.

[0902] Surfactants used in the preparation of microemulsions include, but are not limited to, ionic surfactants, non-ionic surfactants, Brij 96, polyoxyethylene oleyl ethers, polyglycerol fatty acid esters, tetraglycerol monolaurate (ML310), tetraglycerol monooleate (MO310), hexaglycerol monooleate (PO310), hexaglycerol pentaoleate (PO500), decaglycerol monocaprate (MCA750), decaglycerol monooleate (MO750), decaglycerol sequioleate (SO750), decaglycerol decaoleate (DAO750), alone or in combination with cosurfactants. The cosurfactant, usually a short-chain alcohol such as ethanol, 1-propanol, and 1-butanol, serves to increase the interfacial fluidity by penetrating into the surfactant film and consequently creating a disordered film because of the void space generated among surfactant molecules. Microemulsions can, however, be prepared without the use of cosurfactants and alcohol-free self-emulsifying microemulsion systems are known in the art. The aqueous phase can typically be, but is not limited to, water, an aqueous solution of the drug, glycerol, PEG300, PEG400, polyglycerols, propylene glycols, and derivatives of ethylene glycol. The oil phase can include, but is not limited to, materials such as Captex 300, Captex 355, Capmul MCM, fatty acid esters, medium chain (C8-C12) mono, di, and tri-glycerides, polyoxyethylated glyceryl fatty acid esters, fatty alcohols, polyglycolized glycerides, saturated polyglycolized C8-C10 glycerides, vegetable oils and silicone oil.

[0903] Microemulsions are particularly of interest from the standpoint of drug solubilization and the enhanced absorption of drugs. Lipid based microemulsions (both o/w and w/o) have been proposed to enhance the oral bioavailability of drugs, including peptides (see e.g., U.S. Pat. Nos. 6,191,105; 7,063,860; 7,070,802; 7,157,099; Constantinides et al., Pharmaceutical Research, 1994, 11, 1385-1390; Ritschel, Meth. Find. Exp. Clin. Pharmacol., 1993, 13, 205). Microemulsions afford advantages of improved drug solubilization, protection of drug from enzymatic hydrolysis, possible enhancement of drug absorption due to surfactant-induced alterations in membrane fluidity and permeability, case of preparation, case of oral administration over solid dosage forms, improved clinical potency, and decreased toxicity (see e.g., U.S. Pat. Nos. 6,191,105; 7,063,860; 7,070,802; 7,157,099; Constantinides et al., Pharmaceutical Research, 1994, 11, 1385; Ho et al., J. Pharm. Sci., 1996, 85, 138-143). Often microemulsions can form spontaneously when their components are brought together at ambient temperature. This can be particularly advantageous when formulating thermolabile drugs, peptides or RNAi agents. Microemulsions have also been effective in the transdermal delivery of active components in both cosmetic and pharmaceutical applications. It is expected that the microemulsion compositions and formulations of the present disclosure will facilitate the increased systemic absorption of RNAi agents and nucleic acids from the gastrointestinal tract, as well as improve the local cellular uptake of RNAi agents and nucleic acids.

[0904] Microemulsions of the present disclosure can also contain additional components and additives such as sorbitan monostearate (Grill 3), Labrasol, and penetration enhancers to improve the properties of the formulation and to enhance the absorption of the RNAi agents and nucleic acids of the present disclosure. Penetration enhancers used in the microemulsions of the present disclosure can be classified as belonging to one of five broad categories—surfactants, fatty acids, bile salts, chelating agents, and non-chelating non-surfactants (Lee et al., Critical Reviews in Therapeutic Drug Carrier Systems, 1991, p. 92). Each of these classes has been discussed above.

iii. Microparticles

[0905] An RNAi agent of the disclosure may be incorporated into a particle, e.g., a microparticle. Microparticles can be produced by spray-drying, but may also be produced by other methods including lyophilization, evaporation, fluid bed drying, vacuum drying, or a combination of these techniques.

iv. Penetration Enhancers

[0906] In one embodiment, the present disclosure employs various penetration enhancers to effect the efficient delivery of nucleic acids, particularly RNAi agents, to the skin of animals. Most drugs are present in solution in both ionized and nonionized forms. However, usually only lipid soluble or lipophilic drugs readily cross cell membranes. It has been discovered that even non-lipophilic drugs can cross cell membranes if the membrane to be crossed is treated with a penetration enhancer. In addition to aiding the diffusion of non-lipophilic drugs across cell membranes, penetration enhancers also enhance the permeability of lipophilic drugs.

[0907] Penetration enhancers can be classified as belonging to one of five broad categories, i.e., surfactants, fatty acids, bile salts, chelating agents, and non-chelating non-surfactants (see e.g., Malmsten, M. Surfactants and polymers in drug delivery, Informa Health Care, New York, NY, 2002; Lee et al., Critical Reviews in Therapeutic Drug Carrier Systems, 1991, p.92). Each of the above mentioned classes of penetration enhancers are described below in greater detail.

[0908] Surfactants (or “surface-active agents”) are chemical entities which, when dissolved in an aqueous solution, reduce the surface tension of the solution or the interfacial tension between the aqueous solution and another liquid, with the result that absorption of RNAi agents through the mucosa is enhanced. In addition to bile salts and fatty acids, these penetration enhancers include, for example, sodium lauryl sulfate, polyoxyethylene-9-lauryl ether and polyoxyethylene-20-cetyl ether) (see e.g., Malmsten, M. Surfactants and polymers in drug delivery, Informa Health Care, New York, NY. 2002; Lee et al., Critical Reviews in Therapeutic Drug Carrier Systems, 1991, p.92); and perfluorochemical emulsions, such as FC-43. Takahashi et al., J. Pharm. Pharmacol., 1988, 40, 252).

[0909] Various fatty acids and their derivatives which act as penetration enhancers include, for example, oleic acid, lauric acid, capric acid (n-decanoic acid), myristic acid, palmitic acid, stearic acid, linoleic acid, linolenic acid, dicaprate, tricaprate, monoolein (1-monooleoyl-rac-glycerol), dilaurin, caprylic acid, arachidonic acid, glycerol 1-monocaprate, 1-dodecylazacycloheptan-2-one, acylcarnitines, acylcholines, C1 20 alkyl esters thereof (e.g., methyl, isopropyl and t-butyl), and mono- and di-glycerides thereof (i.e., oleate, laurate, caprate, myristate, palmitate, stearate, linoleate, etc.) (see e.g., Touitou, E., et al. Enhancement in Drug Delivery, CRC Press, Danvers, M A, 2006; Lee et al., Critical Reviews in Therapeutic Drug Carrier Systems, 1991, p.92; Muranishi, Critical Reviews in Therapeutic Drug Carrier Systems, 1990, 7, 1-33; El Hariri et al., J. Pharm. Pharmacol., 1992, 44, 651-654).

[0910] The physiological role of bile includes the facilitation of dispersion and absorption of lipids and fat-soluble vitamins (see e.g., Malmsten, M. Surfactants and polymers in drug delivery, Informa Health Care, New York, NY, 2002; Brunton, Chapter 38 in: Goodman & Gilman's The Pharmacological Basis of Therapeutics, 9th Ed., Hardman et al. Eds., McGraw-Hill, New York, 1996, pp. 934-935). Various natural bile salts, and their synthetic derivatives, act as penetration enhancers. Thus the term “bile salts” includes any of the naturally occurring components of bile as well as any of their synthetic derivatives. Suitable bile salts include, for example, cholic acid (or its pharmaceutically acceptable sodium salt, sodium cholate), dehydrocholic acid (sodium dehydrocholate), deoxycholic acid (sodium deoxycholate), glucholic acid (sodium glucholate), glycholic acid (sodium glycocholate), glycodeoxycholic acid (sodium glycodeoxycholate), taurocholic acid (sodium taurocholate), taurodeoxycholic acid (sodium taurodeoxycholate), chenodeoxycholic acid (sodium chenodeoxycholate), ursodeoxycholic acid (UDCA), sodium tauro-24,25-dihydro-fusidate (STDHF), sodium glycodihydrofusidate and polyoxyethylene-9-lauryl ether (POE) (see e.g., Malmsten, M. Surfactants and polymers in drug delivery, Informa Health Care, New York, NY, 2002; Lec et al., Critical Reviews in Therapeutic Drug Carrier Systems, 1991, page 92; Swinyard, Chapter 39 In: Remington's Pharmaceutical Sciences, 18th Ed., Gennaro, ed., Mack Publishing Co., Easton, Pa., 1990, pages 782-783; Muranishi, Critical Reviews in Therapeutic Drug Carrier Systems, 1990, 7, 1-33; Yamamoto et al., J. Pharm. Exp. Ther., 1992, 263, 25; Yamashita et al., J. Pharm. Sci., 1990, 79, 579-583).

[0911] Chelating agents, as used in connection with the present disclosure, can be defined as compounds that remove metallic ions from solution by forming complexes therewith, with the result that absorption of RNAi agents through the mucosa is enhanced. With regards to their use as penetration enhancers in the present disclosure, chelating agents have the added advantage of also serving as DNase inhibitors, as most characterized DNA nucleases require a divalent metal ion for catalysis and are thus inhibited by chelating agents (Jarrett, J. Chromatogr., 1993, 618, 315-339). Suitable chelating agents include but are not limited to disodium ethylenediaminetetraacetate (EDTA), citric acid, salicylates (e.g., sodium salicylate, 5-methoxysalicylate and homovanilate), N-acyl derivatives of collagen, laureth-9 and N-amino acyl derivatives of beta-diketones (enamines)(see e.g., Katdare, A. et al., Excipient development for pharmaceutical, biotechnology, and drug delivery, CRC Press, Danvers, M A, 2006; Lec et al., Critical Reviews in Therapeutic Drug Carrier Systems, 1991, page 92; Muranishi, Critical Reviews in Therapeutic Drug Carrier Systems, 1990, 7, 1-33; Buur et al., J. Control Rel., 1990, 14, 43-51).

[0912] As used herein, non-chelating non-surfactant penetration enhancing compounds can be defined as compounds that demonstrate insignificant activity as chelating agents or as surfactants but that nonetheless enhance absorption of RNAi agents through the alimentary mucosa (sce e.g., Muranishi, Critical Reviews in Therapeutic Drug Carrier Systems, 1990, 7, 1-33). This class of penetration enhancers includes, for example, unsaturated cyclic urcas, 1-alkyl- and 1-alkenylazacyclo-alkanone derivatives (Lec et al., Critical Reviews in Therapeutic Drug Carrier Systems, 1991, page 92); and non-steroidal anti-inflammatory agents such as diclofenac sodium, indomethacin and phenylbutazone (Yamashita et al., J. Pharm. Pharmacol., 1987, 39, 621-626).

[0913] Agents that enhance uptake of RNAi agents at the cellular level can also be added to the pharmaceutical and other compositions of the present disclosure. For example, cationic lipids, such as lipofectin (Junichi et al, U.S. Pat. No. 5,705,188), cationic glycerol derivatives, and polycationic molecules, such as polylysine (WO 97/30731), are also known to enhance the cellular uptake of dsRNAs.

[0914] Other agents can be utilized to enhance the penetration of the administered nucleic acids, including glycols such as ethylene glycol and propylene glycol, pyrrols such as 2-pyrrol, azones, and terpenes such as limonene and menthone.

vi. Excipients

[0915] In contrast to a carrier compound, a “pharmaceutical carrier” or “excipient” is a pharmaceutically acceptable solvent, suspending agent or any other pharmacologically inert vehicle for delivering one or more nucleic acids to an animal. The excipient can be liquid or solid and is selected, with the planned manner of administration in mind, so as to provide for the desired bulk, consistency, etc., when combined with a nucleic acid and the other components of a given pharmaceutical composition. Typical pharmaceutical carriers include, but are not limited to, binding agents (e.g., pregelatinized maize starch, polyvinylpyrrolidone or hydroxypropyl methylcellulose, etc.); fillers (e.g., lactose and other sugars, microcrystalline cellulose, pectin, gelatin, calcium sulfate, ethyl cellulose, polyacrylates or calcium hydrogen phosphate, etc.); lubricants (e.g., magnesium stearate, talc, silica, colloidal silicon dioxide, stearic acid, metallic stearates, hydrogenated vegetable oils, corn starch, polyethylene glycols, sodium benzoate, sodium acetate, etc.); disintegrants (e.g., starch, sodium starch glycolate, etc.); and wetting agents (e.g., sodium lauryl sulphate, etc).

[0916] Pharmaceutically acceptable organic or inorganic excipients suitable for non-parenteral administration which do not deleteriously react with nucleic acids can also be used to formulate the compositions of the present disclosure. Suitable pharmaceutically acceptable carriers include, but are not limited to, water, salt solutions, alcohols, polyethylene glycols, gelatin, lactose, amylose, magnesium stearate, talc, silicic acid, viscous paraffin, hydroxymethylcellulose, polyvinylpyrrolidone and the like.

[0917] Formulations for topical administration of nucleic acids can include sterile and non-sterile aqueous solutions, non-aqueous solutions in common solvents such as alcohols, or solutions of the nucleic acids in liquid or solid oil bases. The solutions can also contain buffers, diluents and other suitable additives. Pharmaceutically acceptable organic or inorganic excipients suitable for non-parenteral administration which do not deleteriously react with nucleic acids can be used.

[0918] Suitable pharmaceutically acceptable excipients include, but are not limited to, water, salt solutions, alcohol, polyethylene glycols, gelatin, lactose, amylose, magnesium stearate, talc, silicic acid, viscous paraffin, hydroxymethylcellulose, polyvinylpyrrolidone and the like.

vii. Other Components

[0919] The compositions of the present disclosure can additionally contain other adjunct components conventionally found in pharmaceutical compositions, at their art-established usage levels. Thus, for example, the compositions can contain additional, compatible, pharmaceutically-active materials such as, for example, antipruritics, astringents, local anesthetics or anti-inflammatory agents, or can contain additional materials useful in physically formulating various dosage forms of the compositions of the present disclosure, such as dyes, flavoring agents, preservatives, antioxidants, opacifiers, thickening agents and stabilizers. However, such materials, when added, should not unduly interfere with the biological activities of the components of the compositions of the present disclosure. The formulations can be sterilized and, if desired, mixed with auxiliary agents, e.g., lubricants, preservatives, stabilizers, wetting agents, emulsifiers, salts for influencing osmotic pressure, buffers, colorings, flavorings or aromatic substances and the like which do not deleteriously interact with the nucleic acid(s) of the formulation.

[0920] Aqueous suspensions can contain substances which increase the viscosity of the suspension including, for example, sodium carboxymethylcellulose, sorbitol or dextran. The suspension can also contain stabilizers.

[0921] In some embodiments, pharmaceutical compositions featured in the disclosure include (a) one or more RNAi agents and (b) one or more agents which function by a non-RNAi mechanism and which are useful in treating a C9orf72-associated disorder. Examples of such agents include, but are not limited to, monoamine inhibitors, reserpine, anticonvulsants, antipsychotic agents, and antidepressants.

[0922] Toxicity and therapeutic efficacy of such compounds can be determined by standard pharmaceutical procedures in cell cultures or experimental animals, e.g., for determining the LD₅₀ (the dose lethal to 50% of the population) and the ED₅₀ (the dose therapeutically effective in 50% of the population). The dose ratio between toxic and therapeutic effects is the therapeutic index and it can be expressed as the ratio LD₅₀/ED₅₀. Compounds that exhibit high therapeutic indices are preferred.

[0923] The data obtained from cell culture assays and animal studies can be used in formulating a range of dosage for use in humans. The dosage of compositions featured herein in the disclosure lies generally within a range of circulating concentrations that include the ED₅₀ with little or no toxicity. The dosage can vary within this range depending upon the dosage form employed and the route of administration utilized. For any compound used in the methods featured in the disclosure, the therapeutically effective dose can be estimated initially from cell culture assays. A dose can be formulated in animal models to achieve a circulating plasma concentration range of the compound or, when appropriate, of the polypeptide product of a target sequence (e.g., achieving a decreased concentration of the polypeptide) that includes the IC50 (i.e., the concentration of the test compound which achieves a half-maximal inhibition of symptoms) as determined in cell culture. Such information can be used to more accurately determine useful doses in humans. Levels in plasma can be measured, for example, by high performance liquid chromatography.

[0924] In addition to their administration, as discussed above, the RNAi agents featured in the disclosure can be administered in combination with other known agents effective in treatment of pathological processes mediated by nucleotide repeat expression. In any event, the administering physician can adjust the amount and timing of RNAi agent administration on the basis of results observed using standard measures of efficacy known in the art or described herein.

### VII. Kits

[0925] In certain aspects, the instant disclosure provides kits that include a suitable container containing a pharmaceutical formulation of a siRNA compound, e.g., a double-stranded siRNA compound, or ssiRNA compound, (e.g., a precursor, e.g., a larger siRNA compound which can be processed into a ssiRNA compound, or a DNA which encodes an siRNA compound, e.g., a double-stranded siRNA compound, or ssiRNA compound, or precursor thereof).

[0926] Such kits include one or more dsRNA agent(s) and instructions for use, e.g., instructions for administering a prophylactically or therapeutically effective amount of a dsRNA agent(s). The dsRNA agent may be in a vial or a pre-filled syringe. The kits may optionally further comprise means for administering the dsRNA agent (e.g., an injection device, such as a pre-filled syringe), or means for measuring the inhibition of C9orf72 (e.g., means for measuring the inhibition of C9orf72 mRNA, C9orf72 protein, and/or C9orf72 activity). Such means for measuring the inhibition of C9orf72 may comprise a means for obtaining a sample from a subject, such as, e.g., a CSF and/or plasma sample. The kits of the invention may optionally further comprise means for determining the therapeutically effective or prophylactically effective amount.

[0927] In certain embodiments the individual components of the pharmaceutical formulation may be provided in one container. Alternatively, it may be desirable to provide the components of the pharmaceutical formulation separately in two or more containers, e.g., one container for a siRNA compound preparation, and at least another for a carrier compound. The kit may be packaged in a number of different configurations such as one or more containers in a single box. The different components can be combined, e.g., according to instructions provided with the kit. The components can be combined according to a method described herein, e.g., to prepare and administer a pharmaceutical composition. The kit can also include a delivery device.

### VII. Methods for Inhibiting C9orf72 Expression

[0928] The present disclosure also provides methods of inhibiting the expression or reducing the level of a C9orf72 gene or a transcript associated with the C9orf72 locus in a cell. The methods include contacting a cell with an RNAi agent, e.g., double stranded RNAi agent, in an amount effective to inhibit the expression or reducing the level of C9orf72 or a transcript associated with the C9orf72 locus in the cell, thereby inhibiting the expression or reducing the level of C9orf72 or reducing the amount of the transcript associated with the C9orf72 locus in the cell. In certain embodiments of the disclosure, C9orf72 is inhibited preferentially in CNS (e.g., brain) cells.

[0929] In some embodiments, the methods include contacting a cell with two or more dsRNA agents targeting C9orf72. In certain embodiments of the methods including two or more dsRNA agents, the two or more dsRNA agents may be present in the same composition, in separate compositions, or any combination thereof.

[0930] In one embodiment of the methods which include contacting a cell with two or more dsRNA agents targeting C9orf72, at least one dsRNA agent targets an antisense strand of C9orf72 and at least one dsRNA agent targets a sense strand of C9orf72.

[0931] In some embodiments, suitable agents targeting a sense strand of C9orf72 for use in the methods of the invention comprising two or more dsRNA agents comprise a sense strand an antisense strand forming a double stranded region selected from the group consisting of
[0932] a) an antisense strand comprising at least 15 contiguous nucleotides differing by no more than 3 nucleotides from any one of the antisense nucleotide sequences in any one of Tables 5, 6, 10B, and 10D;
[0933] b) a sense strand comprising at least 15 contiguous nucleotides differing by no more than three nucleotides from any one of the nucleotide sequence of nucleotides 1-23; 15-37; 33-55; 37-59; or 62-84 of SEQ ID NO: 1, and an antisense strand comprising at least 15 contiguous nucleotides from the corresponding nucleotide sequence of SEQ ID NO:5;
[0934] c) a sense strand comprising at least 15 contiguous nucleotides differing by no more than three nucleotides from any one of the nucleotide sequence of nucleotides 5197-5219; 5226-5248; 5233-5255; 5248-5270; 5539-5561; 5547-5569; 5917-5939; 5936-5958; 5954-5976; 6008-6030; 6021-6043; 6036-6058; 6043-6065; or 6048-6070 of SEQ ID NO: 15, and an antisense strand comprising at least 15 contiguous nucleotides from the corresponding nucleotide sequence of SEQ ID NO:16;
[0935] d) a sense strand comprising at least 15 contiguous nucleotides differing by no more than three nucleotides from any one of the nucleotide sequence of nucleotides 5015-5052; 5017-5040; 5032-5059; 5032-5055; 5033-5055; 5035-5059; 5036-5059; 5058-5087; 5059-5087; 5059-5084; 5064-5087; 5197-5222; 5213-5267; 5223-5252; 5229-5252; 5233-5263; 5516-5570; 5539-5565; 5539-5562; 5545-5570; 5545-5569; 5593-5616; 5883-5950; 5917-5950; 5919-5950; 5923-5950; 5934-5977; 5934-5957; 5938-5977; 5938-5965; 5938-5961; 5947-5977; 5947-5973; 5972-6001; 5973-5997; 6006-6029; 6011-6070; 6011-6039; 6011-6038; 6015-6038; 6019-6045; 6019-6042; 6033-6070; 6035-6065; 6035-6059; or 6040-6063 of SEQ ID NO: 15, and an antisense strand comprising at least 15 contiguous nucleotides from the corresponding nucleotide sequence of SEQ ID NO:16;
[0936] e) a sense strand comprising at least 15 contiguous nucleotides differing by no more than three nucleotides from any one of the nucleotide sequence of nucleotides 15-52; 17-40; 32-59; 32-55; 35-59; 36-59; 58-87; 59-87; 59-84; or 64-87 of SEQ ID NO: 1, and an antisense strand comprising at least 15 contiguous nucleotides from the corresponding nucleotide sequence of SEQ ID NO:5; and
[0937] f) an antisense strand comprising at least 15 contiguous nucleotides differing by no more than 3 nucleotides from any one of the antisense nucleotide sequences in any one of Tables 8, 9, 10B, and 10D,
[0938] wherein the sense strand, the antisense strand, or both the sense strand and the antisense strand is conjugated to one or more lipophilic moieties.

[0939] In certain embodiments, suitable agents targeting a sense strand of C9orf72, e.g., of a C9orf72 exon or intron sense sequence, for use in the methods of the invention comprising two or more dsRNA agents are those dsRNA agents disclosed in PCT Publication No. WO 2021/119226, the entire contents of which are incorporated herein by reference.

[0940] In certain embodiments, suitable agents targeting an antisense strand of C9orf72 for use in the methods of the invention comprising two or more dsRNA agents comprise a sense strand an an antisense strand forming a double stranded region selected from the group consisting of
[0941] a) a sense strand comprising at least 15 contiguous nucleotides differing by no more than 3 nucleotides from the nucleotide sequence of SEQ ID NO:13 and an antisense strand comprising a nucleotide sequence comprising at least 15 contiguous nucleotides differing by no more than 3 nucleotides from the corresponding portion of the nucleotide sequence of SEQ ID NO:14,
[0942] b) an antisense comprising a nucleotide sequence selected from the group consisting of any of the antisense strand nucleotide sequences in any one of Tables 2, 3, 10A, 10C. 11, and 12; and
[0943] c) an antisense strand comprising at least 15 contiguous nucleotides differing by no more than three nucleotides from nucleotides 27573296-27573318; 27573314-27573336; 27573319-27573341; 27573562-27573584; 27573585-27573607; 27573592-27573614; 27573599-27573621; 27573608-27573630; 27573616-27573638; 27573619-27573641; 27573622-27573644; 27573633-27573655; 27573690-27573712; or 27573717-27573739 of SEQ ID NO: 13;
[0944] d) a sense strand comprising at least 15 contiguous nucleotides differing by no more than three nucleotides from any one of the nucleotide sequence of nucleotides 27573296-27573584; 27573296-27573575; 27573301-27573338; 27573318-27573342; 27573555-27573583; 27573581-27573607; 27573584-27573607; 27573588-27573671; 27573588-27573666; 27573588-27573624; 27573592-27573624; 27573592-27573617; 27573598-27573624; 27573599-27573623; 27573606-27573655; 27573606-27573652; 27573606-27573647; 27573654-27573712; or 27573707-27573740 of SEQ ID NO: 13, and an antisense strand comprising at least 15 contiguous nucleotides from the corresponding nucleotide sequence of SEQ ID NO: 14,
[0945] wherein the sense strand, the antisense strand, or both the sense strand and the antisense strand is conjugated to one or more lipophilic moieties.

[0946] In some embodiments, the methods of the invention include contacting a cell with a composition comprising two or more, e.g., 2, 3, or 4, dsRNA agents of the invention, e.g., any two or more of the dsRNA agents selected from the group of dsRNA agents in Tables 2, 3, 5, 6, 8, 9, 10A, 10B, 10C, 10D, 11, and 12.

[0947] In some embodiments of the methods of the invention which include contacting a cell with two or more dsRNA agents, as described herein, e.g., any two or more, e.g., 2, 3, or 4, of the dsRNA agents selected from the group of dsRNA agents in Tables 2, 3, 5, 6, 8, 9, 10A, 10B, 10C, 10D, 11, and 12, the cell may be contacted with a first agent (or a composition comprising a first agent) at a first time, a second agent (or a composition comprising a second agent) at a second time, a third agent (or a composition comprising a third agent) at a third time, and a fourth agent (or a composition comprising a fourth agent) at a fourth time; or the cell may be contacted with all of the agents (or a composition comprising all of the agents) at the same time. Alternatively, the cell may be contacted with a first agent (or a composition comprising a first agent) at a first time and a second, third, and/or fourth agent (or a composition comprising a second, third, and/or fourth agent) at a second time. Other combinations of contacting the cell with two or more agents (or compositions comprising two or more dsRNA agents) of the invention are also contemplated.

[0948] Contacting of a cell with an RNAi agent, e.g., a double stranded RNAi agent, may be done in vitro or in vivo. Contacting a cell in vivo with the RNAi agent includes contacting a cell or group of cells within a subject, e.g., a human subject, with the RNAi agent. Combinations of in vitro and in vivo methods of contacting a cell are also possible.

[0949] Contacting a cell may be direct or indirect, as discussed above. Furthermore, contacting a cell may be accomplished via a targeting ligand, including any ligand described herein or known in the art. In some embodiments, the targeting ligand is a carbohydrate moiety, e.g., a GalNAc ligand, or any other ligand that directs the RNAi agent to a site of interest.

[0950] The term “inhibiting.” as used herein, is used interchangeably with “reducing.” “silencing.” “downregulating.” “suppressing” and other similar terms, and includes any level of inhibition. In certain embodiments, a level of inhibition, e.g., for an RNAi agent of the instant disclosure, can be assessed in cell culture conditions, e.g., wherein cells in cell culture are transfected via Lipofectamine™-mediated transfection at a concentration in the vicinity of a cell of 10 nM or less, 1 nM or less, etc. Knockdown of a given RNAi agent can be determined via comparison of pre-treated levels in cell culture versus post-treated levels in cell culture, optionally also comparing against cells treated in parallel with a scrambled or other form of control RNAi agent. Knockdown in cell culture of, e.g., about 50%, can thereby be identified as indicative of “inhibiting” or “reducing”, “downregulating” or “suppressing”, etc. having occurred. It is expressly contemplated that assessment of targeted mRNA or encoded protein levels (and therefore an extent of “inhibiting”, etc. caused by an RNAi agent of the disclosure) can also be assessed in in vivo systems for the RNAi agents of the instant disclosure, under properly controlled conditions as described in the art.

[0951] The phrase “inhibiting expression of a C9orf72 gene” or “inhibiting expression of C9orf72.” as used herein, includes inhibition of the expression, or reducing the level, of any C9orf72 gene (such as, e.g., a mouse C9orf72 gene, a rat C9orf72 gene, a monkey C9orf72 gene, or a human C9orf72 gene) as well as variants or mutants of a C9orf72 gene that encode a C9orf72 protein, e.g., a C9orf72 gene having an expanded hexanucleotide repeat in an intron of the gene. Thus, the C9orf72 gene may be a wild-type C9orf72 gene, a mutant C9orf72 gene, or a transgenic C9orf72 gene in the context of a genetically manipulated cell, group of cells, or organism.

[0952] The phrase “reducing the level or amount of the transcript associated with the C9orf72 locus” or “knocking down a transcript associated with the C9orf72 locus” includes inhibition of expression of or reducing the level or amount in a cell of an antisense strand of C9orf72 or a sense strand of C9orf72 (such as, e.g., a C9orf72 sense strand or antisense strand transcript containing a hexanucleotide repeat expansion).

[0953] “Inhibiting expression of a C9orf72 gene” includes any level of inhibition of a C9orf72 gene, e.g., at least partial suppression of the expression of a C9orf72 gene, such as an inhibition by at least 20%. In certain embodiments, inhibition is by at least 30%, at least 40%, or preferably, by at least 50%. In other embodiments, inhibition is no more than 50%, e.g., no more than 50%, 45%, 40%, 35%, 30%, 25%, 20%, 15%, 10%, or 5%.

[0954] The expression of a C9orf72 gene may be assessed based on the level of any variable associated with C9orf72 gene expression, e.g., C9orf72 mRNA level (e.g., sense mRNA, antisense mRNA, total C9orf72 mRNA, sense C9orf72 repeat-containing mRNA, and/or antisense C9orf72 repeat-containing mRNA) or C9orf72 protein level (e.g., total C9orf72 protein, wild-type C9orf72 protein, or expanded repeat-containing protein), or, for example, the level of sense- or antisense-containing foci and/or the level of aberrant dipeptide repeat protein.

[0955] Inhibition may be assessed by a decrease in an absolute or relative level of one or more of these variables compared with a control level. The control level may be any type of control level that is utilized in the art, e.g., a pre-dose baseline level, or a level determined from a similar subject, cell, or sample that is untreated or treated with a control (such as, e.g., buffer only control or inactive agent control).

[0956] For example, in some embodiments of the methods of the disclosure, expression of a C9orf72 gene (e.g., as assessed by sense- or antisense-containing foci and/or aberrant dipeptide repeat protein level) is inhibited by at least 20%, 30%, 40%, 50%, 60%, 70%, 80%, 85%, 90%, or 95%, or to below the level of detection of the assay. In other embodiments of the methods of the disclosure, expression of a C9orf72 gene (e.g., as assessed by mRNA or protein expression level) is inhibited by no more than 50%, 45%, 40%, 35%, 30%, 25%, 20%, 15%, 10%, or 5%. In certain embodiments, the methods include a clinically relevant inhibition of expression of C9orf72, e.g. as demonstrated by a clinically relevant outcome after treatment of a subject with an agent to reduce the expression of C9orf72.

[0957] Inhibition of the expression of a C9orf72 gene may be manifested by a reduction of the amount of mRNA expressed by a first cell or group of cells (such cells may be present, for example, in a sample derived from a subject) in which a C9orf72 gene is transcribed and which has or have been treated (e.g., by contacting the cell or cells with an RNAi agent of the disclosure, or by administering an RNAi agent of the disclosure to a subject in which the cells are or were present) such that the expression of a C9orf72 gene is inhibited, as compared to a second cell or group of cells substantially identical to the first cell or group of cells but which has not or have not been so treated (control cell(s) not treated with an RNAi agent or not treated with an RNAi agent targeted to the gene of interest). The degree of inhibition may be expressed in terms of:

$$\frac{( RNA in control cells ) - ( RNA in treated cells )}{RNA in control cells} \times 100 \%$$

[0958] In other embodiments, inhibition of the expression of a C9orf72 gene may be assessed in terms of a reduction of a parameter that is functionally linked to a C9orf72 gene expression, e.g., C9orf72 protein expression, sense- or antisense-containing foci and/or the level of aberrant dipeptide repeat protein. C9orf72 gene silencing may be determined in any cell expressing C9orf72, either endogenous or heterologous from an expression construct, and by any assay known in the art.

[0959] Inhibition of the expression of a C9orf72 protein may be manifested by a reduction in the level of the C9orf72 protein (or functional parameter, e.g., as described herein) that is expressed by a cell or group of cells (e.g., the level of protein expressed in a sample derived from a subject). As explained above, for the assessment of mRNA suppression, the inhibiton of protein expression levels in a treated cell or group of cells may similarly be expressed as a percentage of the level of protein in a control cell or group of cells.

[0960] A control cell or group of cells that may be used to assess the inhibition of the expression of a C9orf72 gene includes a cell or group of cells that has not yet been contacted with an RNAi agent of the disclosure. For example, the control cell or group of cells may be derived from an individual subject (e.g., a human or animal subject) prior to treatment of the subject with an RNAi agent.

[0961] The level of C9orf72 mRNA that is expressed by a cell or group of cells may be determined using any method known in the art for assessing mRNA expression. In one embodiment, the level of expression of C9orf72 in a sample is determined by detecting a transcribed polynucleotide, or portion thereof, e.g., mRNA of the C9orf72 gene. RNA may be extracted from cells using RNA extraction techniques including, for example, using acid phenol/guanidine isothiocyanate extraction (RNAzol B; Biogenesis), RNeasy™ RNA preparation kits (Qiagen®) or PAXgene (PreAnalytix, Switzerland). Typical assay formats utilizing ribonucleic acid hybridization include nuclear run-on assays, RT-PCR, RNase protection assays, northern blotting, in situ hybridization, and microarray analysis. Strand specific C9orf72 mRNAs may be detected using the quantitative RT-PCR and, or droplet digital PCR methods described in, for example, Jiang, et al. supra, Lagier-Tourenne, et al., supra and Jiang, et al., supra. Circulating C9orf72 mRNA may be detected using methods the described in WO2012/177906, the entire contents of which are hereby incorporated herein by reference.

[0962] In some embodiments, the level of expression of C9orf72 is determined using a nucleic acid probe. The term “probe”, as used herein, refers to any molecule that is capable of selectively binding to a specific C9orf72 nucleic acid or protein, or fragment thereof. Probes can be synthesized by one of skill in the art, or derived from appropriate biological preparations. Probes may be specifically designed to be labeled. Examples of molecules that can be utilized as probes include, but are not limited to, RNA, DNA, proteins, antibodies, and organic molecules.

[0963] Isolated mRNA can be used in hybridization or amplification assays that include, but are not limited to, Southern or northern analyses, polymerase chain reaction (PCR) analyses and probe arrays. One method for the determination of mRNA levels involves contacting the isolated mRNA with a nucleic acid molecule (probe) that can hybridize to C9orf72 mRNA. In one embodiment, the mRNA is immobilized on a solid surface and contacted with a probe, for example by running the isolated mRNA on an agarose gel and transferring the mRNA from the gel to a membrane, such as nitrocellulose. In an alternative embodiment, the probe(s) are immobilized on a solid surface and the mRNA is contacted with the probe(s), for example, in an Affymetrix® gene chip array. A skilled artisan can readily adapt known mRNA detection methods for use in determining the level of C9orf72 mRNA.

[0964] An alternative method for determining the level of expression of C9orf72 in a sample involves the process of nucleic acid amplification or reverse transcriptase (to prepare cDNA) of for example mRNA in the sample, e.g., by RT-PCR (the experimental embodiment set forth in Mullis, 1987, U.S. Pat. No. 4,683,202), ligase chain reaction (Barany (1991) Proc. Natl. Acad. Sci. USA 88:189-193), self sustained sequence replication (Guatelli et al. (1990) Proc. Natl. Acad. Sci. USA 87:1874-1878), transcriptional amplification system (Kwoh et al. (1989) Proc. Natl. Acad. Sci. USA 86:1173-1177), Q-Beta Replicase (Lizardi et al. (1988) Bio/Technology 6:1197), rolling circle replication (Lizardi et al., U.S. Pat. No. 5,854,033) or any other nucleic acid amplification method, followed by the detection of the amplified molecules using techniques well known to those of skill in the art. These detection schemes are especially useful for the detection of nucleic acid molecules if such molecules are present in very low numbers. In particular aspects of the disclosure, the level of expression of C9orf72 is determined by quantitative fluorogenic RT-PCR (i.e., the TaqMan™ System), by a Dual-Glo® Luciferase assay, or by other art-recognized method for measurement of C9orf72 expression or mRNA level.

[0965] The expression level of C9orf72 mRNA may be monitored using a membrane blot (such as used in hybridization analysis such as northern, Southern, dot, and the like), or microwells, sample tubes, gels, beads or fibers (or any solid support comprising bound nucleic acids). See U.S. Pat. Nos. 5,770,722, 5,874,219, 5,744,305, 5,677,195 and 5,445,934, which are incorporated herein by reference. The determination of C9orf72 expression level may also comprise using nucleic acid probes in solution.

[0966] In some embodiments, the level of mRNA expression is assessed using branched DNA (bDNA) assays or real time PCR (qPCR). The use of this PCR method is described and exemplified in the Examples presented herein. Such methods can also be used for the detection of C9orf72 nucleic acids.

[0967] The level of C9orf72 protein expression may be determined using any method known in the art for the measurement of protein levels. Such methods include, for example, electrophoresis, capillary electrophoresis, high performance liquid chromatography (HPLC), thin layer chromatography (TLC), hyperdiffusion chromatography, fluid or gel precipitin reactions, absorption spectroscopy, a colorimetric assays, spectrophotometric assays, flow cytometry, immunodiffusion (single or double), immunoelectrophoresis, western blotting, radioimmunoassay (RIA), enzyme-linked immunosorbent assays (ELISAs), immunofluorescent assays, electrochemiluminescence assays, and the like. Such assays can also be used for the detection of proteins indicative of the presence or replication of C9orf72 proteins.

[0968] The level of sense- or antisense-containing foci and the level of aberrant dipeptide repeat protein may be assessed using methods well-known to one of ordinary skill in the art, including, for example, fluorescent in situ hybridization (FISH), immunohistochemistry and immunoassay (see, e.g., Jiang, et al. supra). In some embodiments, the efficacy of the methods of the disclosure in the treatment of a C9orf72-associated disease is assessed by a decrease in C9orf72 mRNA level (e.g. by assessment of a CSF sample and/or plasma sample for C9orf72 level, by brain biopsy, or otherwise).

[0969] In some embodiments of the methods of the disclosure, the RNAi agent is administered to a subject such that the RNAi agent is delivered to a specific site within the subject. The inhibition of expression of C9orf72 may be assessed using measurements of the level or change in the level of C9orf72 mRNA (e.g., sense mRNA, antisense mRNA, total C9orf72 mRNA, sense C9orf72 repeat-containing mRNA, and/or antisense C9orf72 repeat-containing mRNA), C9orf72 protein(e.g., total C9orf72 protein, wild-type C9orf72 protein, or expanded repeat-containing protein), sense-containing foci, antisense-containing foci, aberrant dipeptide repeat protein in a sample derived from a specific site within the subject, e.g., CNS cells. In certain embodiments, the methods include a clinically relevant inhibition of expression of C9orf72, e.g. as demonstrated by a clinically relevant outcome after treatment of a subject with an agent to reduce the expression of C9orf72, suchas, for example, stabilization or inhibition of caudate atrophy (e.g., as assessed by volumetric MRI (vMRI)), a stabilization or reduction in neurofilament light chain (Nfl) levels in a CSF sample from a subject, a reduction in mutant C9orf72 mRNA or a cleaved mutant C9orf72 protein, e.g., one or both of full-length mutant C9orf72 mRNA or protein and a cleaved mutant C9orf72 mRNA or protein, and a stabilization or improvement in Unified C9orf72-associated disease Rating Scale (UHDRS) score.

[0970] As used herein, the terms detecting or determining a level of an analyte are understood to mean performing the steps to determine if a material, e.g., protein, RNA, is present. As used herein, methods of detecting or determining include detection or determination of an analyte level that is below the level of detection for the method used.

### IX. Methods of Treating or Preventing C9orf72-Associated Diseases

[0971] The methods disclosed herein provide for the therapeutic reduction in the synthesis of dipeptide repeat proteins, a principle pathogenic component of C9orf72 repeat expansion discasc, while sparing the C9orf72 mRNA, thereby avoiding possible adverse effects of reduction of C9orf72 protein, as could occur with therapeutic strategies, such as the use of antisense oligonucleotides, that target the primary C9orf72 transcript in the nucleus.

[0972] Some of the methods disclosed herein are for inhibiting expression or reducing the level of a C9orf72 target RNA comprising a hexanucleotide repeat comprising multiple contiguous copies of the hexanucleotide repeat in a cell. The C9orf72 target RNA can be, for example, one with a pathogenic hexanucleotide repeat expansion (having, for example, at least about 30, at least about 35, at least about 40, at least about 50, at least about 60, at least about 70, at least about 80, at least about 100, at least about 200, at least about 300, at least about 400, or at least about 500 copies of the hexanucleotide repeat). Such methods can comprise introducing into the cell any of the dsRNA agents disclosed herein, thereby inhibiting expression of the C9orf72 target RNA in the cell.

[0973] Thus, the present disclosure also provides methods of using an RNAi agent of the disclosure or a composition (such as a pharmaceutical composition) containing an RNAi agent of the disclosure to reduce the level of one or more C9orf72 RNA transcripts in a cell. The methods include contacting the cell with a dsRNA, two or more dsRNA agents, e.g., 2, 3, or 4, of the disclosure, a composition (such as a pharmaceutical compostion) comprising two or more, e.g., 2, 3, or 4, dsRNA agent of the disclosure, or two or more, e.g., 2, 3, or 4, compositions (such as pharmaceutical compositions), each independently comprising a dsRNA agent of the invention, and maintaining the cell for a time sufficient to obtain degradation of the mRNA transcript of a C9orf72 gene, thereby reducing the level of one or more the C9orf72 RNA transcripts in the cell.

[0974] In addition, the present disclosure also provides methods of using an RNAi agent of the disclosure or a composition (such as a pharmaceutical compostion) containing an RNAi agent of the disclosure to reduce the level and/or inhibit formation of sense- and antisense-containing foci in a cell. The methods include contacting the cell with a dsRNA of the disclosure, two or more dsRNAs, e.g., 2, 3, or 4, of the disclosure, a composition (such as a pharmaceutical compostion) comprising two or more, e.g., 2, 3, or 4, dsRNAs of the disclosure, or two or more, e.g., 2, 3, or 4, compositions (such as pharmaceutical compositions), each independently comprising a dsRNA agent of the invention, thereby reducing the level of the C9orf72 sense- and antisense-containing foci in the cell.

[0975] The present disclosure also provides methods of using an RNAi agent of the disclosure or a composition (such as a pharmaceutical compostion) containing an RNAi agent of the disclosure to reduce the level and/or inhibit formation of aberrant dipeptide repeat protein in a cell. The methods include contacting the cell with a dsRNA of the disclosure, two or more dsRNA, e.g., 2, 3, or 4, of the disclosure, a composition (such as a pharmaceutical compostion) comprising two or more, e.g., 2, 3, or 4, dsRNA of the disclosure, or two or more, e.g., 2, 3, or 4, compositions (such as pharmaceutical compositions), each independently comprising a dsRNA agent of the invention, thereby reducing the level of the aberrant dipeptide repeat protein in the cell.

[0976] Such methods can further comprise assessing expression of the C9orf72 target RNA in the cell and/or assessing expression of a mature C9orf72 mRNA in the cell. The assessing can be done, for example, by reverse-transcription quantitative polymerase chain reactions to detect the C9orf72 target RNA. However, any other suitable method may be used.

[0977] In the methods of the disclosure the cell may be contacted in vitro or in vivo, i.e., the cell may be within a subject.

[0978] In some embodiments, the methods include contacting a cell with two or more dsRNA agents targeting C9orf72. In certain embodiments of the methods including two or more dsRNA agents, the two or more dsRNA agents may be present in the same composition, in separate compositions, or any combination thereof.

[0979] In one embodiment of the methods which include contacting a cell with two or more dsRNA agents targeting C9orf72, at least one dsRNA agent which targets an antisense strand of C9orf72 and at least one dsRNA agent which targets a sense strand of C9orf72.

[0980] In some embodiments, suitable agents targeting a sense strand of C9orf72 for use in the methods of the invention comprising two or more dsRNA agents comprise a sense strand and an antisense strand forming a double stranded region selected from the group consisting of
[0981] a) a sense strand comprising at least 15 contiguous nucleotides differing by no more than 3 nucleotides from the nucleotide sequence of SEQ ID NO:1 and an antisense strand comprising a nucleotide sequence comprising at least 15 contiguous nucleotides differing by no more than 3 nucleotides from the corresponding portion of the nucleotide sequence of SEQ ID NO:5,
[0982] b) a sense strand comprising at least 15 contiguous nucleotides differing by no more than 3 nucleotides from the nucleotide sequence of SEQ ID NO:15 and an antisense strand comprising a nucleotide sequence comprising at least 15 contiguous nucleotides differing by no more than 3 nucleotides from the corresponding portion of the nucleotide sequence of SEQ ID NO:16,
[0983] c) an antisense strand comprising at least 15 contiguous nucleotides differing by no more than 3 nucleotides from any one of the antisense nucleotide sequences in any one of Tables 5, 6, 10B, and 10D;
[0984] d) a sense strand comprising at least 15 contiguous nucleotides differing by no more than three nucleotides from any one of the nucleotide sequence of nucleotides 1-23; 15-37; 33-55; 37-59; 62-84, or 69-91 of SEQ ID NO: 1, and an antisense strand comprising at least 15 contiguous nucleotides from the corresponding nucleotide sequence of SEQ ID NO:5;
[0985] c) a sense strand comprising at least 15 contiguous nucleotides differing by no more than three nucleotides from any one of the nucleotide sequence of nucleotides 5197-5219; 5223-5245; 5226-5248; 5227-5249; 5233-5255; 5248-5270; 5539-5561; 5547-5569; 5917-5939; 5936-5958; 5954-5976; 6008-6030; 6021-6043; 6036-6058; 6043-6065; or 6048-6070 of SEQ ID NO: 15, and an antisense strand comprising at least 15 contiguous nucleotides from the corresponding nucleotide sequence of SEQ ID NO:16;
[0986] f) a sense strand comprising at least 15 contiguous nucleotides differing by no more than three nucleotides from any one of the nucleotide sequence of nucleotides 5015-5052; 5017-5040; 5032-5059; 5032-5055; 5033-5055; 5035-5059; 5036-5059; 5058-5087; 5059-5087; 5059-5084; 5064-5087; 5197-5222; 5213-5267; 5223-5252; 5229-5252; 5233-5263; 5516-5570; 5539-5565; 5539-5562; 5545-5570; 5545-5569; 5593-5616; 5883-5950; 5917-5950; 5919-5950; 5923-5950; 5934-5977; 5934-5957; 5938-5977; 5938-5965; 5938-5961; 5947-5977; 5947-5973; 5972-6001; 5973-5997; 6006-6029; 6011-6070; 6011-6039; 6011-6038; 6015-6038; 6019-6045; 6019-6042; 6033-6070; 6035-6065; 6035-6059; or 6040-6063 of SEQ ID NO: 15, and an antisense strand comprising at least 15 contiguous nucleotides from the corresponding nucleotide sequence of SEQ ID NO:16;
[0987] g) a sense strand comprising at least 15 contiguous nucleotides differing by no more than three nucleotides from any one of the nucleotide sequence of nucleotides 15-52; 17-40; 32-59; 32-55; 35-59; 36-59; 58-87; 59-87; 59-84; or 64-87 of SEQ ID NO: 1, and an antisense strand comprising at least 15 contiguous nucleotides from the corresponding nucleotide sequence of SEQ ID NO:5; and
[0988] h) an antisense strand comprising at least 15 contiguous nucleotides differing by no more than 3 nucleotides from any one of the antisense nucleotide sequences in any one of Tables 8 and 9,
[0989] wherein the sense strand, the antisense strand, or both the sense strand and the antisense strand comprises at least one modified nucleotide.

[0990] In some embodiments, the sense strand, the antisense strand, or both the sense and the antisense strand is conjugated to one or more lipophilic moieties.

[0991] In certain embodiments, suitable agents targeting a sense strand of C9orf72, e.g, of a C9orf72 exon or intron sense sequence, for use in the methods of the invention comprising two or more dsRNA agents are those dsRNA agents disclosed in PCT Publication No. WO 2021/119226, the entire contents of which are incorporated herein by reference.

[0992] In certain embodiments, suitable agents targeting an antisense strand of C9orf72 for use in the methods of the invention comprising two or more dsRNA agents comprise a sense strand an an antisense strand forming a double stranded region selected from the group consisting of
[0993] a) a sense strand comprising at least 15 contiguous nucleotides differing by no more than 3 nucleotides from the nucleotide sequence of SEQ ID NO:13 and an antisense strand comprising a nucleotide sequence comprising at least 15 contiguous nucleotides differing by no more than 3 nucleotides from the corresponding portion of the nucleotide sequence of SEQ ID NO: 14,
[0994] b) a sense strand comprising at least 15 contiguous nucleotides differing by no more than 3 nucleotides from the nucleotide sequence of SEQ ID NO: 17 and an antisense strand comprising a nucleotide sequence comprising at least 15 contiguous nucleotides differing by no more than 3 nucleotides from the corresponding portion of the nucleotide sequence of SEQ ID NO:18,
[0995] c) a sense strand comprising at least 15 contiguous nucleotides differing by no more than 3 nucleotides from the nucleotide sequence of SEQ ID NO:19 and an antisense strand comprising a nucleotide sequence comprising at least 15 contiguous nucleotides differing by no more than 3 nucleotides from the corresponding portion of the nucleotide sequence of SEQ ID NO:20,
[0996] d) an antisense comprising a nucleotide sequence selected from the group consisting of any of the antisense strand nucleotide sequences in any one of Tables 2, 3, 10A, 10C, 11, and 12; and
[0997] e) a sense strand comprising at least 15 contiguous nucleotides differing by no more than three nucleotides from nucleotides 27573296-27573318; 27573314-27573336; 27573319-27573341; 27573562-27573584; 27573585-27573607; 27573592-27573614; 27573599-27573621; 27573608-27573630; 27573616-27573638; 27573619-27573641; 27573622-27573644; 27573633-27573655; 27573690-27573712; or 27573717-27573739 of SEQ ID NO: 13;
[0998] f) a sense strand comprising at least 15 contiguous nucleotides differing by no more than three nucleotides from any one of the nucleotide sequence of nucleotides 27573296-27573584; 27573296-27573575; 27573301-27573338; 27573318-27573342; 27573555-27573583; 27573581-27573607; 27573584-27573607; 27573588-27573671; 27573588-27573666; 27573588-27573624; 27573592-27573624; 27573592-27573617; 27573598-27573624; 27573599-27573623; 27573606-27573655; 27573606-27573652; 27573606-27573647; 27573654-27573712; or 27573707-27573740 of SEQ ID NO: 13, and an antisense strand comprising at least 15 contiguous nucleotides from the corresponding nucleotide sequence of SEQ ID NO:14,
[0999] wherein the sense strand, the antisense strand, or both the sense strand and the antisense strand comprises at least one modified nucleotide.

[1000] In some embodiments, the methods of the invention include contacting a cell with a two or more, e.g., 2, 3, or 4, dsRNA agents of the invention, e.g., any two or more of the dsRNA agents selected from the group of dsRNA agents in Tables 2, 3, 5, 6, 8, 9, 10A, 10B, 10C, 10D, 11, and 12.

[1001] In some embodiments, the sense strand, the antisense strand, or both the sense and the antisense strand is conjugated to one or more lipophilic moieties.

[1002] A cell suitable for treatment using the methods of the disclosure may be any cell that expresses a C9orf72 gene or a cell that expresses a C9orf72 gene having an expanded hexanucleotides (e.g., GGGGCC) repeat (SEQ ID NO: 100). A cell suitable for use in the methods of the disclosure may be a mammalian cell, e.g., a primate cell (such as a human cell or a non-human primate cell, e.g., a monkey cell or a chimpanzee cell), a non-primate cell (such as a a rat cell, or a mouse cell). In one embodiment, the cell is a human cell, e.g., a human CNS cell. In some embodiments, the cell is a non-human animal one-cell stage embryos, non-human animal embryonic stem cells, embryonic stem-cell derived motor neurons, brain cells, cortical cells, neuronal cells, muscle cells, heart cells, or germ cells.

[1003] In some embodiments, the cell can comprise a C9orf72 locus comprising a pathogenic hexanucleotide repeat expansion. A pathogenic hexanucleotide repeat expansion is an expansion consisting of a number of repeats of GGGGCC (SEQ ID NO: 100) in an intervening sequence separating two putative first, non-coding exons (exons 1A and 1B) in the gene C9orf72 that is associated with one or both of the following pathological readouts: (1) sense and antisense repeat-containing RNA can be visualized as distinct foci in neurons and other cells; and (2) dipeptide repeat proteins-poly(glycine-alanine), poly(glycine-proline), poly(glycine-arginine), poly(alanine-proline), and poly(proline-arginine)-synthesized by repeat-associated non-AUG-dependent translation from the sense and antisense repeat-containing RNA can be detected in cells. The number of repeats can be a higher number of repeats than is normally seen in a locus from someone that does not have C9orf72 ALS or C9orf72 FTD. Alternatively, a pathogenic hexanucleotide repeat expansion can be an expansion (i.e., number of repeats) in a C9orf72 locus from a subject having C9orf72 ALS or C9orf72 FTD. A pathogenic hexanucleotide repeat expansion has a plurality of repeats of GGGGCC (SEQ ID NO: 100). For example, a pathogenic hexanucleotide repeat expansion can have, for example, at least about 30, at least about 35, at least about 40, at least about 50, at least about 60, at least about 70, at least about 80, at least about 100, at least about 200, at least about 300, at least about 400, or at least about 500 copies of the hexanucleotide repeat.

[1004] The cell can be a cell (e.g. a neuron or a motor neuron) from a subject having, or at risk for developing, a C9orf72-hexanucleotide-repeat-expansion associated disease including, for example, C9orf72 ALS or C9orf72 FTD.

[1005] The cells in the methods disclosed herein can be any type of cell comprising a C9orf72 locus. The C9orf72 locus can comprise a hexanucleotide repeat expansion sequence or a pathogenic hexanucleotide repeat expansion sequence as described elsewhere herein. The hexanucleotide repeat expansion sequence may comprise more than 100 repeats of the hexanucleotide sequence set forth as SEQ ID NO: 100.

[1006] A C9orf72 hexanucleotide repeat expansion sequence is generally a nucleotide sequence comprising at least two instances (i.e., two repeats) of the hexanucleotide sequence GGGGCC set forth as SEQ ID NO: 100. In some hexanucleotide repeat expansion sequences, the repeats are contiguous (adjacent to each other without intervening sequence). The repeat expansion sequence can be located, for example, between the first non-coding endogenous exon and exon 2 of the endogenous C9orf72 locus.

[1007] The hexanucleotide repeat expansion sequence can have any number of repeats. For example, the repeat expansion sequence can comprise more than about 95 repeats, more than about 96 repeats, more than about 97 repeats, more than about 98 repeats, more than about 99 repeats, more than about 100 repeats, more than about 101 repeats, more than about 102 repeats, more than about 103 repeats, more than about 104 repeats, more than about 105 repeats, more than about 150 repeats, more than about 200 repeats, more than about 250 repeats, more than about 295 repeats, more than about 296 repeats, more than about 297 repeats, more than about 298 repeats, more than about 299 repeats, more than about 300 repeats, more than about 301 repeats, more than about 302 repeats, more than about 303 repeats, more than about 304 repeats, more than about 305 repeats, more than about 350 repeats, more than about 400 repeats, more than about 450 repeats, more than about 500 repeats, more than about 550 repeats, more than about 595 repeats, more than about 596 repeats, more than about 597 repeats, more than about 598 repeats, more than about 599 repeats, more than about 600 repeats, more than about 601 repeats, more than about 602 repeats, more than about 603 repeats, more than about 604 repeats, or more than about 605 repeats. Alternatively, the repeat expansion sequence can comprise at least about 95 repeats, at least about 96 repeats, at least about 97 repeats, at least about 98 repeats, at least about 99 repeats, at least about 100 repeats, at least about 101 repeats, at least about 102 repeats, at least about 103 repeats, at least about 104 repeats, at least about 105 repeats, at least about 150 repeats, at least about 200 repeats, at least about 250 repeats, at least about 295 repeats, at least about 296 repeats, at least about 297 repeats, at least about 298 repeats, at least about 299 repeats, at least about 300 repeats, at least about 301 repeats, at least about 302 repeats, at least about 303 repeats, at least about 304 repeats, at least about 305 repeats, at least about 350 repeats, at least about 400 repeats, at least about 450 repeats, at least about 500 repeats, at least about 550 repeats, at least about 595 repeats, at least about 596 repeats, at least about 597 repeats, at least about 598 repeats, at least about 599 repeats, at least about 600 repeats, at least about 601 repeats, at least about 602 repeats, at least about 603 repeats, at least about 604 repeats, or at least about 605 repeats. In a specific example, the hexanucleotide repeat expansion sequence comprises more than about 100 repeats, more than about 300 repeats, more than about 600 repeats, at least about 100 repeats, at least about 300 repeats, or at least about 600 repeats.

[1008] The cells can be in vitro, ex vivo, or in vivo. For example, the cells can be in vivo within an animal. The cells or animals can be male or female. The cells or animals can be heterozygous or homozygous for the hexanucleotide repeat expansion sequence inserted at the endogenous C9orf72 locus. A diploid organism has two alleles at each genetic locus. Each pair of alleles represents the genotype of a specific genetic locus. Genotypes are described as homozygous if there are two identical alleles at a particular locus and as heterozygous if the two alleles differ. The non-human animals can comprise the heterologous hexanucleotide repeat expansion sequence inserted at the endogenous C9orf72 locus in their germline genome.

[1009] C9orf72 expression (e.g., as assessed by sense mRNA, antisense mRNA, total C9orf72 mRNA, sense C9orf72 repeat-containing mRNA, antisense C9orf72 repeat-containing mRNA level, total C9orf72 protein, and/or C9orf72 repeat-containing protein) is inhibited in the cell by about 20, 25, 30, 35, 40, 45, or 50%. In preferred embodiments, C9orf72 expression is inhibited by no more than 50%, e.g., no more than 50%, 45%, 40%, 35%, 30%, 25%, 20%, 15%, 10%, or 5%.

[1010] The decrease in expression in the C9orf72 target RNA can be by any amount. Inhibition, as assessed by sense- or antisense-containing foci and/or aberrant dipeptide repeat protein level) is inhibited in the cell by at least 20%, 30%, 40%, preferably at least 50%, 60%, 70%, 80%, 85%, 90%, or 95%, or to below the level of detection of the assay.

[1011] In some embodiments, the dsRNA agent may inhibit expression of the C9orf72 target RNA, such as a C9orf72 target RNA comprising a hexanucleotide repeat, by at least about 10%, at least about 20%, at least about 30%, at least about 40%, at least about 50%, at least about 60%, at least about 70%, at least about 80%, or at least about 90% (or to a point where the C9orf72 target RNA is undetectable). For example, these levels of inhibition can be within about 1 day, within about 2 days, within about 3 days, within about 4 days, within about 5 days, within about 6 days, within about a week, or within about 24 to about 48 hours after administration to a cell expressing the C9orf72 target RNA comprising the hexanucleotide repeat. The decrease can be, for example, relative to the cell before treatment with dsRNA agent or relative to a control cell that was not treated with the dsRNA agent.

[1012] In some of the methods, the dsRNA agents of the invention selectively inhibit expression of the C9orf72 target RNA, such as a C9orf72 target RNA comprising a hexanucleotide repeat, relative to expression of a mature C9orf72 messenger RNA. A mature C9orf72 messenger RNA in this context is a C9orf72 RNA transcript that has been spliced and processed. A mature C9orf72 messenger RNA consists exclusively of exons and has all introns removed. A dsRNA agent selectively inhibits expression of the C9orf72 target RNA comprising the intronic hexanucleotide repeat relative to expression of a mature C9orf72 messenger RNA if the relative decrease in expression of the C9orf72 target RNA is greater than the relative decrease in expression of a mature C9orf72 messenger RNA after administration of the dsRNA agent to a cell expressing the C9orf72 target RNA. For example, in certain embodiments, dsRNA agents of the invention inhibit expression of the mature C9orf72 messenger RNA by less than about 50%, less than about 40%, less than about 30%, less than about 20%, less than about 10%, or less than about 5% (or, for example, does not have any statistically significant or functionally significant effect on expression). For example, these levels of inhibition can be within about 1 day, within about 2 days, within about 3 days, within about 4 days, within about 5 days, within about 6 days, within about a week, or within about 24 to about 48 hours after administration to a cell expressing the C9orf72 target RNA comprising the hexanucleotide repeat. The decrease can be, for example, relative to the cell before treatment with the dsRNA agent or relative to a control cell that was not treated with the dsRNA agent.

[1013] Some of the methods disclosed herein are for reducing dipeptide repeat protein synthesis or dipeptide repeat protein aggregates in a cell. Such methods can comprise introducing into the cell any of the dsRNA agents disclosed herein, two or more dsRNA, e.g., 2, 3, or 4, of the disclosure, a composition (such as a pharmaceutical compostion) comprising two or more, e.g., 2, 3, or 4, dsRNA agents of the disclosure, or two or more, e.g., 2, 3, or 4, compositions (such as pharmaceutical compositions), each independently comprising a dsRNA agent of the invention, thereby reducing dipeptide repeat protein synthesis or dipeptide repeat protein aggregates in the cell.

[1014] Such methods can further comprise assessing the presence of dipeptide repeat protein aggregates (e.g., poly(glycine-alanine), poly(glycine-proline), poly(glycine-arginine), poly(alanine-proline), and poly(proline-arginine)) in the cell. In a specific example, the dipeptide repeat protein can be poly(glycine-alanine) and/or poly(glycine-proline). The assessing can be done, for example, by immunohistochemistry or western blot analysis to detect the dipeptide repeat protein aggregates. However, any other suitable method may be used.

[1015] The decrease in dipeptide repeat protein synthesis or dipeptide repeat protein aggregates can be by any amount. For example, the dsRNA agent can reduce dipeptide repeat protein synthesis or dipeptide repeat protein aggregates by at least about 10%, at least about 20%, at least about 30%, at least about 40%, at least about 50%, at least about 60%, at least about 70%, at least about 80%, or at least about 90% (or to a point where the dipeptide repeat protein aggregates are undetectable). For example, these levels of inhibition can be within about 1 day, within about 2 days, within about 3 days, within about 4 days, within about 5 days, within about 6 days, within about a week, or within about 24 to about 48 hours after administration to a cell expressing the C9orf72 target RNA comprising the hexanucleotide repeat. The decrease can be, for example, relative to the cell before treatment with dsRNA agent or relative to a control cell that was not treated with the dsRNA agent.

[1016] Such methods can further comprise assessing the presence of nuclear and/or cytoplasmic sense and/or antisense C9orf72 RNA foci in the cell.

[1017] The decrease in the presence of nuclear and/or cytoplasmic sense and/or antisense C9orf72 RNA foci can be by any amount. For example, the dsRNA agent can reduce the presence of nuclear and/or cytoplasmic sense and/or antisense C9orf72 RNA foci by at least about 10%, at least about 20%, at least about 30%, at least about 40%, at least about 50%, at least about 60%, at least about 70%, at least about 80%, or at least about 90% (or to a point where the nuclear and/or cytoplasmic sense and/or antisense C9orf72 RNA foci are undetectable). For example, these levels of inhibition can be within about 1 day, within about 2 days, within about 3 days, within about 4 days, within about 5 days, within about 6 days, within about a week, or within about 24 to about 48 hours after administration to a cell expressing the C9orf72 target RNA comprising the hexanucleotide repeat. The decrease can be, for example, relative to the cell before treatment with dsRNA agent or relative to a control cell that was not treated with the dsRNA agent.

[1018] The in vivo methods of the disclosure may include administering to a subject a composition containing an RNAi agent, where the RNAi agent includes a nucleotide sequence that is complementary to at least a part of an RNA transcript of the C9orf72 gene of the mammal to be treated. In some embodiments, the subject is administered two or more, e.g., 2, 3, or 4, compositions, each independently comprising an RNAi agent of the invention. The compositions may be the same or different. In other embodiments, the subject is administered a composition comprising two or more, e.g., 2, 3, or 4, dsRNA agents, each independently targeting a portion of a C9orf72 gene.

[1019] When the organism to be treated is a mammal such as a human, the composition can be administered by any means known in the art including, but not limited to oral, intraperitoneal, or parenteral routes, including intracranial (e.g., intraventricular, intraparenchymal, and intrathecal), intravenous, intramuscular, intravitreal, subcutaneous, transdermal, airway (aerosol), nasal, rectal, and topical (including buccal and sublingual) administration. In certain embodiments, the compositions are administered by intravenous infusion or injection. In certain embodiments, the compositions are administered by subcutaneous injection. In certain embodiments, the compositions are administered by intrathecal injection.

[1020] In some embodiments, the administration is via a depot injection. A depot injection may release the RNAi agent in a consistent way over a prolonged time period. Thus, a depot injection may reduce the frequency of dosing needed to obtain a desired effect, e.g., a desired inhibition of C9orf72, or a therapeutic or prophylactic effect. A depot injection may also provide more consistent serum concentrations. Depot injections may include subcutaneous injections or intramuscular injections. In preferred embodiments, the depot injection is a subcutaneous injection.

[1021] In some embodiments, the administration is via a pump. The pump may be an external pump or a surgically implanted pump. In certain embodiments, the pump is a subcutaneously implanted osmotic pump. In other embodiments, the pump is an infusion pump. An infusion pump may be used for intracranial, intravenous, subcutaneous, arterial, or epidural infusions. In preferred embodiments, the infusion pump is a subcutaneous infusion pump. In other embodiments, the pump is a surgically implanted pump that delivers the RNAi agent to the CNS.

[1022] The mode of administration may be chosen based upon whether local or systemic treatment is desired and based upon the area to be treated. The route and site of administration may be chosen to enhance targeting.

[1023] In one aspect, the present disclosure also provides methods for inhibiting the expression of a C9orf72 gene in a mammal. The methods include administering to the mammal a composition comprising a dsRNA that targets a C9orf72 gene in a cell of the mammal, thereby inhibiting expression of the C9orf72 gene in the cell. In some embodiments, the dsRNA is present in a composition, such as a pharmaceutical composition. In some embodiments, the mammal is administered two or more, e.g., 2, 3, or 4, dsRNA agents of the invention. In some embodiments, each dsRNA agent administered to the subject is independently present in a composition. In other embodiments, the mammal is administered a composition comprising two or more, e.g., 2, 3, or 4, dsRNAs of the invention.

[1024] Reduction in gene expression can be assessed by any methods known it the art and by methods, e.g. qRT-PCR, described herein.

[1025] Reduction in protein production can be assessed by any methods known it the art and by methods, e.g. ELISA, described herein. In one embodiment, a CNS biopsy sample or a cerebrospinal fluid (CSF) sample serves as the tissue material for monitoring the reduction in C9orf72 gene or protein expression (or of a proxy therefore).

[1026] The present disclosure further provides methods of treatment of a subject in need thereof. The treatment methods of the disclosure include administering an RNAi agent of the disclosure to a subject, e.g., a subject that would benefit from inhibition of C9orf72 expression, such as a subject having a GGGGCC expanded nucleotide repeat (SEQ ID NO: 100) in an intron of the C9orf72 gene, in a therapeutically effective amount of an RNAi agent targeting a C9orf72 gene or a pharmaceutical composition comprising an RNAi agent targeting a C9orf72 gene. In some embodiments, the subject is administered a therapeutically effective amount of two or more, e.g., 2, 3, or 4, dsRNA agents of the invention. In some embodiments, each dsRNA agent administered to the subject is independently present in a composition. In other embodiments, the subject is administered a composition comprising two or more, e.g., 2, 3, or 4, dsRNAs of the invention.

[1027] In addition, the present disclosure provides methods of preventing, treating or inhibiting the progression of a C9orf72-associated disease or disorder (e.g., a C9orf72-associated disorder), in a subject. The methods include administering to the subject a therapeutically effective amount of any of the RNAi agent, e.g., dsRNA agents, or the pharmaceutical composition provided herein, thereby preventing, treating or inhibiting the progression of a C9orf72-associated disease or disorder in the subject. In some embodiments, the subject is administered a therapeutically effective amount of two or more, e.g., 2, 3, or 4, dsRNA agents of the invention. In some embodiments, each dsRNA agent administered to the subject is independently present in a composition. In other embodiments, the subject is administered a composition comprising two or more, e.g., 2, 3, or 4, dsRNAs of the invention.

[1028] In some embodiments, the methods are for treating a subject suffering from a C9orf72-hexanucleotide-repeat-expansion-associated disease, condition, or disorder. Such methods can also be for preventing or ameliorating at least one symptom in a subject having a disease, disorder, or condition that would benefit from reduction in expression of a C9orf72 target RNA comprising a hexanucleotide repeat comprising multiple contiguous copies of SEQ ID NO: 100 (e.g., a subject having or at risk of developing a C9orf72-hexanucleotide-repeat-expansion-associated disease, condition, or disorder). The C9orf72 target RNA can be, for example, one with a pathogenic hexanucleotide repeat expansion (having, for example, at least about 30, at least about 35, at least about 40, at least about 50, at least about 60, at least about 70, at least about 80, at least about 100, at least about 200, at least about 300, at least about 400, or at least about 500 copies of the hexanucleotide repeat). A C9orf72-hexanucleotide-repeat-expansion-associated disease, condition, or disorder is one in which caused by or associated with an expansion of a hexanucleotide repeat (GGGGCC; SEQ ID NO: 100) in the 5′ non-coding part of the C9orf72 gene. Examples include amyotrophic lateral sclerosis (ALS) and frontotemporal dementia (FTD). Signs or symptoms associated with FTD and/or ALS, include, but are not limited to, repeat-length-dependent formation of RNA foci, sequestration of specific RNA-binding proteins, and accumulation and aggregation of dipeptide repeat proteins (e.g., poly(glycine-alanine), poly(glycine-proline), poly(glycine-arginine), poly(alanine-proline), and poly(proline-arginine)) resulting from repeat-associated non-AUG (AUG) translation in neurons. The dsRNA agents of the invention may be used in methods for therapeutic treatment and/or prevention of signs or symptoms associated with FTD and/or ALS, including, but not limited to, signs and symptoms of motor neuron disease and signs and symptoms of dementia. Signs and symptoms of motor neuron disease can include, for example, tripping, dropping things, abnormal fatigue of the arms and/or legs, slurred speech, muscle cramps and twitches, uncontrollable periods of laughing or crying, and trouble breathing. Signs and symptoms of dementia can include, for example, behavioral changes, personality changes, speech and language problems, and movement-related problems.

[1029] In some embodiments of the methods of the invention which include administering two or more dsRNA agents, as described herein, e.g., any two or more, e.g., 2, 3, or 4, of the dsRNA agents selected from the group of dsRNA agents in Tables 2, 3, 5, 6, 8, 9, 10A, 10B, 10C, 10D, 11, and 12 the subject may be administered a first agent (or a composition comprising a first agent) at a first time, a second agent (or a composition comprising a second agent) at a second time, a third agent (or a compositions comprising a third agent) at a third time, and a fourth agent (or a composition comprising a fourth agent) at a fourth time; or the subject may be administered all of the agents (or a composition comprising all of the agents at the same time. Alternatively, the subject may be administered a first agent (or a composition comprising a first agent) at a first time and a second, third, and/or fourth agent (or a compostion comprising a second, third and.or fourth agent) at a second time. Other combinations of contacting the cell with two or more agents of the invention are also contemplated.

[1030] An RNAi agent of the disclosure may be administered as a “free RNAi agent.” A free RNAi agent is administered in the absence of a pharmaceutical composition. The naked RNAi agent may be in a suitable buffer solution. The buffer solution may comprise acetate, citrate, prolamine, carbonate, or phosphate, or any combination thereof. In one embodiment, the buffer solution is phosphate buffered saline (PBS). The pH and osmolarity of the buffer solution containing the RNAi agent can be adjusted such that it is suitable for administering to a subject.

[1031] Alternatively, an RNAi agent of the disclosure may be administered as a pharmaceutical composition, such as a dsRNA liposomal formulation.

[1032] Subjects that would benefit from a reduction or inhibition of C9orf72 gene expression are those having a C9orf72-associated disease, e.g., C9orf72-associated disease. Exemplary C9orf72-associated diseases include, but are not limited to, ALS, FTD, C9ALS/FTD and Huntington-Like Syndrome Due To C9orf72 Expansions, parkinsonism, olivopontocerebellar degeneration, corticobasal syndrome, or Alzheimer's disease, e.g., subjects having an expanded GGGGCC hexanucleotide repeat (SEQ ID NO: 100) in an intron of the C9orf72 gene.

[1033] The disclosure further provides methods for the use of an RNAi agent or a pharmaceutical composition thereof, e.g., for treating a subject that would benefit from reduction or inhibition of C9orf72 expression, e.g., a subject having a C9orf72-associated disorder, in combination with other pharmaceuticals or other therapeutic methods, e.g., with known pharmaceuticals or known therapeutic methods, such as, for example, those which are currently employed for treating these disorders. For example, in certain embodiments, an RNAi agent targeting C9orf72 is administered in combination with, e.g., an agent useful in treating a C9orf72-associated disorder as described elsewhere herein or as otherwise known in the art. For example, additional agents suitable for treating a subject that would benefit from reduction in C9orf72 expression, e.g., a subject having a C9orf72-associated disorder, may include agents currently used to treat symptoms of C9orf72-associated diseases. The RNAi agent and additional therapeutic agents may be administered at the same time or in the same combination, e.g., intrathecally, or the additional therapeutic agent can be administered as part of a separate composition or at separate times or by another method known in the art or described herein.

[1034] Exemplary additional therapeutics include, for example, a monoamine inhibitor, e.g., tetrabenazine (Xenazine), deutetrabenazine (Austedo), and reserpine, an anticonvulsant, e.g., valproic acid (Depakote, Depakene, Depacon), and clonazepam (Klonopin), an antipsychotic agent, e.g., risperidone (Risperdal), and haloperidol (Haldol), and an antidepressant, e.g., paroxetine (Paxil).

[1035] In one embodiment, the method includes administering a composition featured herein such that expression of the target C9orf72 gene is decreased, for at least one month. In preferred embodiments, expression is decreased for at least 2 months, 3 months, or 6 months.

[1036] Preferably, the RNAi agents useful for the methods and compositions featured herein specifically target RNAs (primary or processed) of the target C9orf72 gene. Compositions and methods for inhibiting the expression of these genes using RNAi agents can be prepared and performed as described herein.

[1037] Administration of the dsRNA according to the methods of the disclosure may result in a reduction of the severity, signs, symptoms, or markers of such diseases or disorders in a patient with a C9orf72-associated disorder. By “reduction” in this context is meant a statistically significant or clinically significant decrease in such level. The reduction can be, for example, at least 5%, 10%, 15%, 20%, 25%, 30%, 35%, 40%, 45%, 50%, 55%, 60%, 65%, 70%, 75%, 80%, 85%, 90%, 95%, or about 100%.

[1038] Efficacy of treatment or prevention of disease can be assessed, for example by measuring disease progression, disease remission, symptom severity, reduction in pain, quality of life, dose of a medication required to sustain a treatment effect, level of a disease marker or any other measurable parameter appropriate for a given disease being treated or targeted for prevention. It is well within the ability of one skilled in the art to monitor efficacy of treatment or prevention by measuring any one of such parameters, or any combination of parameters. For example, efficacy of treatment of a C9orf72-associated disorder may be assessed, for example, by periodic monitoring of a subject's. Comparisons of the later readings with the initial readings provide a physician an indication of whether the treatment is effective. It is well within the ability of one skilled in the art to monitor efficacy of treatment or prevention by measuring any one of such parameters, or any combination of parameters. In connection with the administration of an RNAi agent targeting C9orf72 or pharmaceutical composition thereof, “effective against” a C9orf72-associated disorder indicates that administration in a clinically appropriate manner results in a beneficial effect for at least a statistically significant fraction of patients, such as an improvement of symptoms, a cure, a reduction in disease, extension of life, improvement in quality of life, or other effect generally recognized as positive by medical doctors familiar with treating C9orf72-associated disorders and the related causes.

[1039] A treatment or preventive effect is evident when there is a statistically significant improvement in one or more parameters of disease status, or by a failure to worsen or to develop symptoms where they would otherwise be anticipated. As an example, a favorable change of at least 10% in a measurable parameter of disease, and preferably at least 20%, 30%, 40%, 50% or more can be indicative of effective treatment. Efficacy for a given RNAi agent drug or formulation of that drug can also be judged using an experimental animal model for the given disease as known in the art. When using an experimental animal model, efficacy of treatment is evidenced when a statistically significant reduction in a marker or symptom is observed.

[1040] Alternatively, the efficacy can be measured by a reduction in the severity of disease as determined by one skilled in the art of diagnosis based on a clinically accepted disease severity grading scale. Any positive change resulting in e.g., lessening of severity of disease measured using the appropriate scale, represents adequate treatment using an RNAi agent or RNAi agent formulation as described herein.

[1041] Subjects can be administered a therapeutic amount of dsRNA, such as about 0.01 mg/kg to about 200 mg/kg.

[1042] The RNAi agent can be administered intrathecally, via intravitreal injection, or by intravenous infusion over a period of time, on a regular basis. In certain embodiments, after an initial treatment regimen, the treatments can be administered on a less frequent basis. Administration of the RNAi agent can reduce C9orf72 levels, e.g., in a cell, tissue, blood, CSF sample or other compartment of the patient. In one embodiment, administration of the RNAi agent can reduce C9orf72 levels, e.g., in a cell, tissue, blood, CSF sample or other compartment of the patient by no more than 50%.

[1043] Before administration of a full dose of the RNAi agent, patients can be administered a smaller dose, such as a 5% infusion reaction, and monitored for adverse effects, such as an allergic reaction. In another example, the patient can be monitored for unwanted immunostimulatory effects, such as increased cytokine (e.g., TNF-alpha or INF-alpha) levels.

[1044] Alternatively, the RNAi agent can be administered subcutaneously, i.e., by subcutaneous injection. One or more injections may be used to deliver the desired, e.g., monthly dose of RNAi agent to a subject. The injections may be repeated over a period of time. The administration may be repeated on a regular basis. In certain embodiments, after an initial treatment regimen, the treatments can be administered on a less frequent basis. A repeat-dose regimine may include administration of a therapeutic amount of RNAi agent on a regular basis, such as monthly or extending to once a quarter, twice per year, once per year. In certain embodiments, the RNAi agent is administered about once per month to about once per quarter (i.e., about once every three months).

[1045] Unless otherwise defined, all technical and scientific terms used herein have the same meaning as commonly understood by one of ordinary skill in the art to which this invention belongs. Although methods and materials similar or equivalent to those described herein can be used in the practice or testing of the RNAi agents and methods featured in the invention, suitable methods and materials are described below. All publications, patent applications, patents, and other references mentioned herein are incorporated by reference in their entirety. In case of conflict, the present specification, including definitions, will control. In addition, the materials, methods, and examples are illustrative only and not intended to be limiting.

### EXAMPLES

### Example 1. Hexanucleotide Repeat Expansion at the C9orf72 Gene Locus

[1046] Amyotrophic lateral sclerosis (ALS) and frontotemporal dementia (FTD) are devastating neurodegenerative diseases that cause motor neuron disease in the case of ALS and dementia in the case of FTD. Both are invariably fatal. ALS and FTD can present as either a spontaneous or familial (i.e., genetic) disease. The most common genetic cause of ALS and FTD is an expansion of a hexanucleotide repeat (GGGGCC; SEQ ID NO: 100) in the 5′ non-coding part of the C9orf72 gene, which encodes a protein whose function is not fully understood. Unaffected people usually have between a few and a few dozen hexanucleotide repeats in their C9orf72 genes, while those that develop ALS and FTD inherit a repeat expansion of hundreds to thousands of copies of the hexanucleotide repeat from only one of their parents. Genetic observations suggest that C9orf72 ALS and FTD are dominant genetic diseases and result from a gain of pathological function.

[1047] It is not known how the C9orf72 hexanucleotide repeat expansion causes motor neuron disease and dementia, but two universal postmortem pathological findings in C9orf72 ALS and FTLD patients are associated with the repeat expansion: (1) sense and antisense repeat-containing RNA can be visualized as distinct foci in neurons and other cells by fluorescent in situ hybridization; and (2) dipeptide repeat proteins-poly(glycine-alanine), poly(glycine-proline), poly(glycine-arginine), poly(alanine-proline), and poly(proline-arginine)-synthesized by repeat-associated non-AUG-dependent translation from the sense and antisense repeat-containing RNAs-can be detected in cells by immunohistochemistry. One disease hypothesis proposes that the repeat-containing RNAs, visualized as foci, disrupt cellular RNA metabolism by sequestering RNA binding proteins. A second disease hypothesis posits that the dipeptide repeat proteins exert wide-spread toxic effects on RNA metabolism, proteostasis, and nucleocytoplasmic transport. Both pathogenic mechanisms could contribute to disease. If C9orf72 repeat-containing RNA transcripts, either on their own or as templates for translation of dipeptide repeat proteins, promote pathogenesis in ALS and FTLD, then a general therapeutic strategy would be to destroy GGGGCC repeat-containing RNA (SEQ ID NO: 100) (sense repeat-containing RNA) and/or GGCCCC repeat-containing RNA (antisense repeat-containing RNA) or abolish its ability to be translated into sense and/or antisense dipeptide repeat protein.

[1048] The C9orf72 gene produces transcripts from two transcription initiation sites. The upstream site initiates transcription with alternative non-coding exon 1A, while the downstream site initiates transcription with alternative exon 1B. Both exons 1A and 1B can be spliced to exon 2, which contains the start of the protein-coding sequence. The pathogenic hexanucleotide repeat expansion is located between exons 1A and 1B. Therefore, transcription initiated from exon 1A can produce repeat-containing RNAs, while initiation from exon 1B cannot, unless going in the antisense direction.

[1049] As described in PCT Application No.: PCT/US2020/064159, filed on Dec. 10, 2020, in order to model C9orf72 repeat expansion disease in mice, an allelic series was constructed in mouse embryonic stem (ES) cells in which a fragment from the human C9orf72 gene, including part of exon 1A, the intron sequence between 1A and 1B, all of exon 1B and part of the downstream intron, was placed precisely at its homologous position in one allele of the mouse C9orf72 gene. Sec, e.g., US 2018/0094267 and WO 2018/064600, each of which is herein incorporated by reference in its entirety for all purposes. A series of hexanucleotide repeat expansions were placed at the position found in the human gene that ranged from the normal three repeats up to the pathological 600 repeats.

[1050] Mouse ES cell clones carrying the different repeat expansions were differentiated into motor neurons in culture to study the effects of the expansions on a cell type relevant to ALS. In examining the transcripts produced from the genetically modified humanized C9orf72 alleles it was found that there was a switch from exon 1B spliced transcripts, which predominate in the three repeat normal control, to increased appearance of exon 1A spliced transcripts in the alleles with longer repeat expansions. It was also observed the accumulation of unspliced intron-containing transcripts whose abundance was directly correlated with the length of the hexanucleotide repeat expansion, suggesting a selfish feed-forward loop in which the longer the repeat expansion, the more repeat-containing transcripts are produced from the C9orf72 gene. Targeting the repeat-containing intronic transcripts for destruction or inactivation as templates for dipeptide repeat protein synthesis while sparing synthesis of the normal C9orf72 mRNA and protein would be expected to be a safe and effective therapeutic strategy for C9orf72 repeat expansion disease.

[1051] One possible approach to reducing C9orf72 repeat-containing RNAs is through the natural process of RNA interference, in which siRNAs direct cleavage of the target RNAs by the RNA-induced silencing complex followed by degradation of the RNA cleavage fragments by cellular nucleases. RNA interference is, however, a predominantly cytoplasmic process that would not be expected to act on RNAs retained in the nucleus. Intron-containing RNAs are usually short-lived, either as mRNA precursors, which are rapidly spliced into mature mRNAs, or as spliced-out introns, which are rapidly degraded in the nucleus. It is reasonable, therefore, to expect that intron-containing RNAs would not be available for targeting by RNA interference.

[1052] However, it has been demonstrated that siRNAs that targeted intron sequences adjacent to the GGGGCC repeat expansion (SEQ ID NO: 100) promoted reduced accumulation of intron-containing C9orf72 RNAs while having little to no effect on the C9orf72 mature mRNA. The intron-targeting siRNAs also reduced production of dipeptide repeat proteins. These unexpected experimental results indicate that the intron-containing RNAs that accumulate in cells with a C9orf72 hexanucleotide repeat expansion are susceptible to RNA interference. The results show that a significant fraction of the intron-containing C9orf72 RNAs responsible for dipeptide repeat protein synthesis resides in the cytoplasm. In contrast, siRNAs that targeted the C9orf72 mRNA protein coding sequence produced a strong knock down of the mRNA but had no effect on the intron-containing transcripts and did not appreciably reduce dipeptide repeat protein synthesis. The divergenee in results between the intron-targeting and mRNA-targeting siRNAs suggests that the two classes of targeted sequences are present on separate RNAs that are not covalently linked.

[1053] The methods and compositions disclosed herein provide for the therapeutic reduction in the synthesis of dipeptide repeat proteins, a principle pathogenic component of C9orf72 repeat expansion disease, while sparing the C9orf72 mRNA, thereby avoiding possible adverse effects of reduction of C9orf72 protein, as could occur with therapeutic strategies, such as the use of antisense oligonucleotides, that target the primary C9orf72 transcript in the nucleus.

### Example 2. RNAi Agent Design, Synthesis, Selection, and In Vitro Evaluation

[1054] This Example describes methods for the design, synthesis, selection, and in vitro evaluation of C9orf72 RNAi agents.

### Source of Reagents

[1055] Where the source of a reagent is not specifically given herein, such reagent can be obtained from any supplier of reagents for molecular biology at a quality/purity standard for application in molecular biology.

### Bioinformatics

[1056] siRNAs targeting the antisense strand of the intron between Exons 1A and 1B in the human C9orf72 gene (GenBank Accession Number NC_000009.12) were designed using custom R and Python scripts. Detailed lists of the unmodified C9orf72 sense and antisense strand nucleotide sequences are shown in Table 2. Detailed lists of the modified C9orf72 sense and antisense strand nucleotide sequences are shown in Table 3.

[1057] siRNAs targeting the sense strand of Exon 1A of the human C9orf72 gene (GenBank Accession Number NM_001256054.2) were designed using custom R and Python scripts, siRNAs targeting the 3′-end of the intronic repeat in the sense strand of the intron between Exons 1A and 1B in the human C9orf72 gene (GenBank Accession Number NG_031977.2) were also designed using custom R and Python scripts. Detailed lists of the unmodified C9orf72 sense and antisense strand nucleotide sequences are shown in Table 5. Detailed lists of the modified C9orf72 sense and antisense strand nucleotide sequences are shown in Table 6.

[1058] It is to be understood that, throughout the application, a duplex name without a decimal is equivalent to a duplex name with a decimal which merely references the batch number of the duplex. For example, AD-347430 is equivalent to AD-347430.1.

In vitro Cos-7 (Dual-Luciferase psiCHECK2 vector), BE(2)-C, and Neuro-2a screening

### Cell Culture and Transfections:

[1059] Cos-7 (ATCC) were transfected by adding 5 μl of 2 ng/μl, diluted in Opti-MEM, C9orf72 intron 1 psiCHECK2 vector (Blue Heron Biotechnology), 4.9 μl of Opti-MEM plus 0.1 μl of Lipofectamine 2000 per well (Invitrogen, Carlsbad CA, cat #11668-019) to 5 μl of siRNA duplexes per well, with 4 replicates of each siRNA duplex, into a 384-well plate, and incubated at room temperature for 15 minutes. Thirty-five μl of Dulbecco's Modified Eagle Medium (ThermoFisher) containing ˜1×10³ cells were then added to the siRNA mixture. Cells were incubated for 48 hours followed by Firefly (transfection control) and Renilla (fused to target sequence) luciferase measurements. Three dose experiments were performed at 10 nM, InM, and 0.1 nM.

Total RNA isolation using DYNABEADS mRNA Isolation Kit:

[1060] RNA was isolated using an automated protocol on a BioTek-EL406 platform using DYNABEADs (Invitrogen, cat #61012). Briefly, 70 μl of Lysis/Binding Buffer and 10 μl of lysis buffer containing 3 μl of magnetic beads were added to the plate with cells. Plates were incubated on an electromagnetic shaker for 10 minutes at room temperature and then magnetic beads were captured and the supernatant was removed. Bead-bound RNA was then washed 2 times with 150 μl Wash Buffer A and once with Wash Buffer B. Beads were then washed with 150 μl Elution Buffer, re-captured and supernatant removed.

cDNA synthesis using ABI High capacity cDNA reverse transcription kit (Applied Biosystems, Foster City, CA, Cat #4368813):

[1061] Ten μl of a master mix containing 1 μl 10X Buffer, 0.4 μl 25X dNTPs, 1 μl 10x Random primers, 0.5 μl Reverse Transcriptase, 0.5 μl RNase inhibitor and 6.6 μl of H₂O per reaction was added to RNA isolated above. Plates were sealed, mixed, and incubated on an electromagnetic shaker for 10 minutes at room temperature, followed by 2 h 37° C.

Real time PCR:

[1062] Two μl of cDNA and 5 μl Lightcycler 480 probe master mix (Roche Cat #04887301001) were added to either 0.5 μl of Human GAPDH TaqMan Probe (4326317E) and 0.5 μl C9orf72 Human probe (Hs00376619_m1, Thermo) or 0.5 μl Mouse GAPDH TaqMan Probe (4352339E) and 0.5 μl C9orf72 Mouse probe (Mm01216837_m1. Thermo) per well in a 384 well plates (Roche cat #04887301001). Real time PCR was done in a LightCycler480 Real Time PCR system (Roche). Each duplex was tested at least two times and data were normalized to cells transfected with a non-targeting control siRNA. To calculate relative fold change, real time data were analyzed using the AACt method and normalized to assays performed with cells transfected with a non-targeting control siRNA.

[1063] The results of the screening of the dsRNA agents listed in Tables 2 and 3 in Cos-7 cells are shown in Table 4 and FIGS. 1 and 2. The results of the screening of the dsRNA agents listed in Tables 5 and 6 in Cos-7 cells are shown in Table 7 and FIGS. 3 and 4.

TABLE 1
Abbreviations of nucleotide monomers used in nucleic acid sequence representation. It will
be understood that these monomers, when present in an oligonucleotide, are mutually
linked by 5′-3′-phosphodiester bonds.

| Abbreviation | Nucleotide(s) |
|---|---|
| A | Adenosine-3′-phosphate |
| Ab | beta-L-adenosine-3′-phosphate |
| Abs | beta-L-adenosine-3′-phosphorothioate |
| Af | 2′-fluoroadenosine-3′-phosphate |
| Afs | 2′-fluoroadenosine-3′-phosphorothioate |
| As | adenosine-3′-phosphorothioate |
| C | cytidine-3′-phosphate |
| Cb | beta-L-cytidine-3′-phosphate |
| Cbs | beta-L-cytidine-3′-phosphorothioate |
| Cf | 2′-fluorocytidine-3′-phosphate |
| Cfs | 2′-fluorocytidine-3′-phosphorothioate |
| Cs | cytidine-3′-phosphorothioate |
| G | guanosine-3′-phosphate |
| Gb | beta-L-guanosine-3′-phosphate |
| Gbs | beta-L-guanosine-3′-phosphorothioate |
| Gf | 2′-fluoroguanosine-3′-phosphate |
| Gfs | 2′-fluoroguanosine-3′-phosphorothioate |
| Gs | guanosine-3′-phosphorothioate |
| T | 5′-methyluridine-3′-phosphate |
| Tf | 2′-fluoro-5-methyluridine-3′-phosphate |
| Tfs | 2′-fluoro-5-methyluridine-3′-phosphorothioate |
| Ts | 5-methyluridine-3′-phosphorothioate |
| U | Uridine-3′-phosphate |
| Uf | 2′-fluorouridine-3′-phosphate |
| Ufs | 2′-fluorouridine -3′-phosphorothioate |
| Us | uridine -3′-phosphorothioate |
| N | any nucleotide, modified or unmodified |
| a | 2′-O-methyladenosine-3′-phosphate |
| as | 2′-O-methyladenosine-3′- phosphorothioate |
| c | 2′-O-methylcytidine-3′-phosphate |
| cs | 2′-O-methylcytidine-3′- phosphorothioate |
| g | 2′-O-methylguanosine-3′-phosphate |
| gs | 2′-O-methylguanosine-3′- phosphorothioate |
| t | 2′-O-methyl-5-methyluridine-3′-phosphate |
| ts | 2′-O-methyl-5-methyluridine-3′-phosphorothioate |
| u | 2′-O-methyluridine-3′-phosphate |
| us | 2′-O-methyluridine-3′-phosphorothioate |
| s | phosphorothioate linkage |
| L96 | N-[tris(GalNAc-alkyl)-amidodecanoyl)]-4-hydroxyprolinol Hyp-(GalNAc-alkyl)3 |
| | [chemical structure] |
| Y34 | 2-hydroxymethyl-tetrahydrofuran-4-methoxy-3-phosphate (abasic 2′-OMe furanose) |
| | [chemical structure] |
| Y44 | inverted abasic DNA (2-hydroxymethyl-tetrahydrofuran-5-phosphate) |
| | [chemical structure] |
| L10 | N-(cholesterylcarboxamidocaproyl)-4-hydroxyprolinol (Hyp-C6-Chol) |
| | [chemical structure] |
| (Agn) | Adenosine-glycol nucleic acid (GNA) S-Isomer |
| (Cgn) | Cytidine-glycol nucleic acid (GNA) S-Isomer |
| (Ggn) | Guanosine-glycol nucleic acid (GNA) S-Isomer |
| (Tgn) | Thymidine-glycol nucleic acid (GNA) S-Isomer |
| P | Phosphate |
| VP | Vinyl-phosphonate |
| dA | 2′-deoxyadenosine-3′-phosphate |
| dAs | 2′-deoxyadenosine-3′-phosphorothioate |
| dC | 2′-deoxycytidine-3′-phosphate |
| dCs | 2′-deoxycytidine-3′-phosphorothioate |
| dG | 2′-deoxyguanosine-3′-phosphate |
| dGs | 2′-deoxyguanosine-3′-phosphorothioate |
| dT | 2′-deoxythymidine-3′-phosphate |
| dTs | 2′-deoxythymidine-3′-phosphorothioate |
| dU | 2′-deoxyuridine |
| dUs | 2′-deoxyuridine-3′-phosphorothioate |
| (C2p) | cytidine-2′-phosphate |
| (G2p) | guanosine-2′-phosphate |
| (U2p) | uridine-2′-phosphate |
| (A2p) | adenosine-2′-phosphate |
| (Ahd) | 2′-O-hexadecyl-adenosine-3′-phosphate |
| (Ahds) | 2′-O-hexadecyl-adenosine-3′-phosphorothioate |
| (Chd) | 2′-O-hexadecyl-cytidine-3′-phosphate |
| (Chds) | 2′-O-hexadecyl-cytidine-3′-phosphorothioate |
| (Ghd) | 2′-O-hexadecyl-guanosine-3′-phosphate |
| (Ghds) | 2′-O-hexadecyl-guanosine-3′-phosphorothioate |
| (Uhd) | 2′-O-hexadecyl-uridine-3′-phosphate |
| (Uhds) | 2′-O-hexadecyl-uridine-3′-phosphorothioate |

TABLE 2
Unmodified Sense and Antisense Strand Sequences of dsRNA Agents Targeting the Antisense Strand of Intron 1a of Human C9orf72

| | | SEQ | | Range in | | SEQ | | |
|---|---|---|---|---|---|---|---|---|
| Duplex | Sense Sequence | ID | Range in | NC_0000 | Antisense Sequence | ID | Range in | Range in |
| Name | 5′ to 3′ | NO: | NG_31977.2 | 09.12 | 5′ to 3′ | NO: | NG_31977.2 | NC_000009.12 |
| AD- | CCGAGGCUCCCUUUUCUCG | 109 | 5761-5781 | 27573086- | UUCGAGAAAAGGGAGCCUCG | 199 | 5761-5783 | 27573084- |
| 1446206.1 | AA | | | 27573106 | GGU | | | 27573106 |
| AD- | AGGCAAUUCCACCAGUCGC | 110 | 5591-5611 | 27573256- | UAGCGACUGGUGGAAUUGCC | 200 | 5591-5613 | 27573254- |
| 1446207.1 | UA | | | 27573276 | UGC | | | 27573276 |
| AD- | CACCAGUCGCUAGAGGCG | 111 | 5582-5602 | 27573265- | UUUCGCCUCUAGCGACUGGU | 1408 | 5582-5604 | 27573263- |
| 1446208.1 | AAA | | | 27573285 | GGA | | | 27573285 |
| AD- | ACCAGUCGCUAGAGGCGA | 112 | 5581-5601 | 27573266- | UUUUCGCCUCUAGCGACUGG | 202 | 5581-5603 | 27573264- |
| 1446209.1 | AAA | | | 27573286 | UGG | | | 27573286 |
| AD- | CACCCAGCUUCGGUCAGAG | 113 | 5555-5575 | 27573292- | UUCUCUGACCGAAGCUGGGU | 1409 | 5555-5577 | 27573290- |
| 1446210.1 | AA | | | 27573312 | GUC | | | 27573312 |
| AD- | CCCAGCUUCGGUCAGAGA | 114 | 5553-5573 | 27573294- | UUUUCUCUGACCGAAGCUGG | 204 | 5553-5575 | 27573292- |
| 1446211.1 | AAA | | | 27573314 | GUG | | | 27573314 |
| AD- | CAGCUUCGGUCAGAGAAA | 115 | 5551-5571 | 27573296- | UCAUUUCUCUGACCGAAGCU | 205 | 5551-5573 | 27573294- |
| 1446212.1 | UGA | | | 27573316 | GGG | | | 27573316 |
| AD- | GCUUCGGUCAGAGAAAUG | 116 | 5549-5569 | 27573298- | UCUCAUUUCUCUGACCGAAG | 1410 | 5549-5571 | 27573296- |
| 1446213.1 | AGA | | | 27573318 | CUG | | | 27573318 |
| AD- | UCGGUCAGAGAAAUGAGA | 117 | 5546-5566 | 27573301- | UCCUCUCAUUUCUCUGACCG | 207 | 5546-5568 | 27573299- |
| 1446214.1 | GGA | | | 27573321 | AAG | | | 27573321 |
| AD- | GGUCAGAGAAAUGAGAGG | 118 | 5544-5564 | 27573303- | UUCCCUCUCAUUUCUCUGACC | 1411 | 5544-5566 | 27573301- |
| 1446215.1 | GAA | | | 27573323 | GA | | | 27573323 |
| AD- | UCAGAGAAAUGAGAGGGA | 119 | 5542-5562 | 27573305- | UUUUCCCUCUCAUUUCUCUG | 209 | 5542-5564 | 27573303- |
| 1446216.1 | AAA | | | 27573325 | ACC | | | 27573325 |
| AD- | AGAGGGAAAGUAAAAAUG | 120 | 5531-5551 | 27573316- | UCGCAUUUUUACUUUCCCUC | 210 | 5531-5553 | 27573314- |
| 1446217.1 | CGA | | | 27573336 | UCA | | | 27573336 |
| AD- | GAGGGAAAGUAAAAAUGC | 121 | 5530-5550 | 27573317- | UACGCAUUUUUACUUUCCCU | 211 | 5530-5552 | 27573315- |
| 1446218.1 | GUA | | | 27573337 | CUC | | | 27573337 |
| AD- | AGGGAAAGUAAAAAUGCG | 122 | 5529-5549 | 27573318- | UGACGCAUUUUUACUUUCCC | 212 | 5529-5551 | 27573316- |
| 1446219.1 | UCA | | | 27573338 | UCU | | | 27573338 |
| AD- | GGGAAAGUAAAAAUGCGU | 123 | 5528-5548 | 27573319- | UCGACGCAUUUUUACUUUCC | 213 | 5528-5550 | 27573317- |
| 1446220.1 | CGA | | | 27573339 | CUC | | | 27573339 |
| AD- | GGAAAGUAAAAAUGCGUC | 124 | 5527-5547 | 27573320- | UUCGACGCAUUUUUACUUUC | 214 | 5527-5549 | 27573318- |
| 1446221.1 | GAA | | | 27573340 | CCU | | | 27573340 |
| AD- | GAAAGUAAAAAUGCGUCG | 125 | 5526-5546 | 27573321- | UCUCGACGCAUUUUUACUUU | 215 | 5526-5548 | 27573319- |
| 1446222.1 | AGA | | | 27573341 | CCC | | | 27573341 |
| AD- | AAAGUAAAAAUGCGUCGA | 126 | 5525-5545 | 27573322- | UGCUCGACGCAUUUUUACUU | 216 | 5525-5547 | 27573320- |
| 1446223.1 | GCA | | | 27573342 | UCC | | | 27573342 |
| AD- | AAGUAAAAAUGCGUCGAG | 127 | 5524-5544 | 27573323- | UAGCUCGACGCAUUUUUACU | 217 | 5524-5546 | 27573321- |
| 1446224.1 | CUA | | | 27573343 | UUC | | | 27573343 |
| AD- | AGUAAAAAUGCGUCGAGC | 128 | 5523-5543 | 27573324- | UGAGCUCGACGCAUUUUUAC | 218 | 5523-5545 | 27573322- |
| 1446225.1 | UCA | | | 27573344 | UUU | | | 27573344 |
| AD- | CGACUCCUGAGUUCCAGA | 129 | 5293-5313 | 27573554- | UGCUCUGGAACUCAGGAGUC | 219 | 5293-5315 | 27573552- |
| 1446226.1 | GCA | | | 27573574 | GCG | | | 27573574 |
| AD- | GACUCCUGAGUUCCAGAG | 130 | 5292-5312 | 27573555- | UAGCUCTGGAACUCAGGAGU | 220 | 5292-5314 | 27573553- |
| 1446227.1 | CUA | | | 27573575 | CGC | | | 27573575 |
| AD- | ACUCCUGAGUUCCAGAGC | 131 | 5291-5311 | 27573556- | UAAGCUCUGGAACUCAGGAG | 221 | 5291-5313 | 27573554- |
| 1446228.1 | UUA | | | 27573576 | UCG | | | 27573576 |
| AD- | CUCCUGAGUUCCAGAGCU | 132 | 5290-5310 | 27573557- | UCAAGCTCUGGAACUCAGGA | 222 | 5290-5312 | 27573555- |
| 1446229.1 | UGA | | | 27573577 | GUC | | | 27573577 |
| AD- | UCCUGAGUUCCAGAGCUU | 133 | 5289-5309 | 27573558- | UGCAAGCUCUGGAACUCAGG | 223 | 5289-5311 | 27573556- |
| 1446230.1 | GCA | | | 27573578 | AGU | | | 27573578 |
| AD- | CCUGAGUUCCAGAGCUUG | 134 | 5288-5308 | 27573559- | UAGCAAGCUCUGGAACUCAG | 224 | 5288-5310 | 27573557- |
| 1446231.1 | CUA | | | 27573579 | GAG | | | 27573579 |
| AD- | GAGUUCCAGAGCUUGCUA | 135 | 5285-5305 | 27573562- | UUGUAGCAAGCUCUGGAACU | 225 | 5285-5307 | 27573560- |
| 1446232.1 | CAA | | | 27573582 | CAG | | | 27573582 |
| AD- | AGUUCCAGAGCUUGCUAC | 136 | 5284-5304 | 27573563- | UCUGUAGCAAGCUCUGGAAC | 226 | 5284-5306 | 27573561- |
| 1446233.1 | AGA | | | 27573583 | UCA | | | 27573583 |
| AD- | GUUCCAGAGCUUGCUACA | 137 | 5283-5303 | 27573564- | UCCUGUAGCAAGCUCUGGAA | 227 | 5283-5305 | 27573562- |
| 1446234.1 | GGA | | | 27573584 | CUC | | | 27573584 |
| AD- | UUCCAGAGCUUGCUACAG | 138 | 5282-5302 | 27573565- | UGCCUGTAGCAAGCUCUGGA | 228 | 5282-5304 | 27573563- |
| 1446235.1 | GCA | | | 27573585 | ACU | | | 27573585 |
| AD- | UCCAGAGCUUGCUACAGG | 139 | 5281-5301 | 27573566- | UAGCCUGUAGCAAGCUCUGG | 229 | 5281-5303 | 27573564- |
| 1446236.1 | CUA | | | 27573586 | AAC | | | 27573586 |
| AD- | CCAGAGCUUGCUACAGGC | 140 | 5280-5300 | 27573567- | UCAGCCTGUAGCAAGCUCUG | 230 | 5280-5302 | 27573565- |
| 1446237.1 | UGA | | | 27573587 | GAA | | | 27573587 |
| AD- | CAGAGCUUGCUACAGGCU | 141 | 5279-5299 | 27573568- | UGCAGCCUGUAGCAAGCUCU | 231 | 5279-5301 | 27573566- |
| 1446238.1 | GCA | | | 27573588 | GGA | | | 27573588 |
| AD- | UACAGGCUGCGGUUGUUU | 142 | 5269-5289 | 27573578- | UGGAAACAACCGCAGCCUGU | 232 | 5269-5291 | 27573576- |
| 1446239.1 | CCA | | | 27573598 | AGC | | | 27573598 |
| AD- | GCUGCGGUUGUUUCCCUCC | 143 | 5264-5284 | 27573583- | UAGGAGGGAAACAACCGCAG | 233 | 5264-5286 | 27573581- |
| 1446240.1 | UA | | | 27573603 | CCU | | | 27573603 |
| AD- | CUGCGGUUGUUUCCCUCCU | 144 | 5263-5283 | 27573584- | UAAGGAGGGAAACAACCGCA | 234 | 5263-5285 | 27573582- |
| 1446241.1 | UA | | | 27573604 | GCC | | | 27573604 |
| AD- | GCGGUUGUUUCCCUCCUU | 145 | 5261-5281 | 27573586- | UACAAGGAGGGAAACAACCG | 235 | 5261-5283 | 27573584- |
| 1446242.1 | GUA | | | 27573606 | CAG | | | 27573606 |
| AD- | CGGUUGUUUCCCUCCUUG | 146 | 5260-5280 | 27573587- | UAACAAGGAGGGAAACAACC | 236 | 5260-5282 | 27573585- |
| 1446243.1 | UUA | | | 27573607 | GCA | | | 27573607 |
| AD- | GUUGUUUCCCUCCUUGUU | 147 | 5258-5278 | 27573589- | UAAAACAAGGAGGGAAACAA | 237 | 5258-5280 | 27573587- |
| 1446244.1 | UUA | | | 27573609 | CCG | | | 27573609 |
| AD- | UUGUUUCCCUCCUUGUUU | 148 | 5257-5277 | 27573590- | UGAAAACAAGGAGGGAAACA | 238 | 5257-5279 | 27573588- |
| 1446245.1 | UCA | | | 27573610 | ACC | | | 27573610 |
| AD- | UUCCCUCCUUGUUUUCUUC | 149 | 5253-5273 | 27573594- | UAGAAGAAAACAAGGAGGGA | 239 | 5253-5275 | 27573592- |
| 1446246.1 | UA | | | 27573614 | AAC | | | 27573614 |
| AD- | UCCCUCCUUGUUUUCUUCU | 150 | 5252-5272 | 27573595- | UCAGAAGAAAACAAGGAGGG | 240 | 5252-5274 | 27573593- |
| 1446247.1 | GA | | | 27573615 | AAA | | | 27573615 |
| AD- | CCCUCCUUGUUUUCUUCUG | 151 | 5251-5271 | 27573596- | UCCAGAAGAAAACAAGGAGG | 241 | 5251-5273 | 27573594- |
| 1446248.1 | GA | | | 27573616 | GAA | | | 27573616 |
| AD- | CCUCCUUGUUUUCUUCUG | 152 | 5250-5270 | 27573597- | UACCAGAAGAAAACAAGGAG | 242 | 5250-5272 | 27573595- |
| 1446249.1 | GUA | | | 27573617 | GGA | | | 27573617 |
| AD- | CUCCUUGUUUUCUUCUGG | 153 | 5249-5269 | 27573598- | UAACCAGAAGAAAACAAGGA | 243 | 5249-5271 | 27573596- |
| 1446250.1 | UUA | | | 27573618 | GGG | | | 27573618 |
| AD- | CCUUGUUUUCUUCUGGUU | 154 | 5247-5267 | 27573600- | UUUAACCAGAAGAAAACAAG | 244 | 5247-5269 | 27573598- |
| 1446251.1 | AAA | | | 27573620 | GAG | | | 27573620 |
| AD- | CUUGUUUUCUUCUGGUUA | 155 | 5246-5266 | 27573601- | UAUUAACCAGAAGAAAACAA | 245 | 5246-5268 | 27573599- |
| 1446252.1 | AUA | | | 27573621 | GGA | | | 27573621 |
| AD- | UUGUUUUCUUCUGGUUAA | 156 | 5245-5265 | 27573602- | UGAUUAACCAGAAGAAAACA | 246 | 5245-5267 | 27573600- |
| 1446253.1 | UCA | | | 27573622 | AGG | | | 27573622 |
| AD- | UGUUUUCUUCUGGUUAAU | 157 | 5244-5264 | 27573603- | UAGAUUAACCAGAAGAAAAC | 247 | 5244-5266 | 27573601- |
| 1446254.1 | CUA | | | 27573623 | AAG | | | 27573623 |
| AD- | GUUUUCUUCUGGUUAAUC | 158 | 5243-5263 | 27573604- | UAAGAUUAACCAGAAGAAAA | 248 | 5243-5265 | 27573602- |
| 1446255.1 | UUA | | | 27573624 | CAA | | | 27573624 |
| AD- | UUCUUCUGGUUAAUCUUU | 159 | 5240-5260 | 27573607- | UAUAAAGAUUAACCAGAAGA | 249 | 5240-5262 | 27573605- |
| 1446256.1 | AUA | | | 27573627 | AAA | | | 27573627 |
| AD- | UCUUCUGGUUAAUCUUUA | 160 | 5239-5259 | 27573608- | UGAUAAAGAUUAACCAGAAG | 250 | 5239-5261 | 27573606- |
| 1446257.1 | UCA | | | 27573628 | AAA | | | 27573628 |
| AD- | CUUCUGGUUAAUCUUUAU | 161 | 5238-5258 | 27573609- | UUGAUAAAGAUUAACCAGAA | 251 | 5238-5260 | 27573607- |
| 1446258.1 | CAA | | | 27573629 | GAA | | | 27573629 |
| AD- | UUCUGGUUAAUCUUUAUC | 162 | 5237-5257 | 27573610- | UCUGAUAAAGAUUAACCAGA | 252 | 5237-5259 | 27573608- |
| 1446259.1 | AGA | | | 27573630 | AGA | | | 27573630 |
| AD- | UCUGGUUAAUCUUUAUCA | 163 | 5236-5256 | 27573611- | UCCUGAUAAAGAUUAACCAG | 253 | 5236-5258 | 27573609- |
| 1446260.1 | GGA | | | 27573631 | AAG | | | 27573631 |
| AD- | CUGGUUAAUCUUUAUCAG | 164 | 5235-5255 | 27573612- | UACCUGAUAAAGAUUAACCA | 254 | 5235-5257 | 27573610- |
| 1446261.1 | GUA | | | 27573632 | GAA | | | 27573632 |
| AD- | UGGUUAAUCUUUAUCAGG | 165 | 5234-5254 | 27573613- | UGACCUGAUAAAGAUUAACC | 255 | 5234-5256 | 27573611- |
| 1446262.1 | UCA | | | 27573633 | AGA | | | 27573633 |
| AD- | GUUAAUCUUUAUCAGGUC | 166 | 5232-5252 | 27573615- | UAAGACCUGAUAAAGAUUAA | 256 | 5232-5254 | 27573613- |
| 1446263.1 | UUA | | | 27573635 | CCA | | | 27573635 |
| AD- | UUAAUCUUUAUCAGGUCU | 167 | 5231-5251 | 27573616- | UAAAGACCUGAUAAAGAUUA | 257 | 5231-5253 | 27573614- |
| 1446264.1 | UUA | | | 27573636 | ACC | | | 27573636 |
| AD- | AAUCUUUAUCAGGUCUUU | 168 | 5229-5249 | 27573618- | UGAAAAGACCUGAUAAAGAU | 258 | 5229-5251 | 27573616- |
| 1446265.1 | UCA | | | 27573638 | UAA | | | 27573638 |
| AD- | AUCUUUAUCAGGUCUUUU | 169 | 5228-5248 | 27573619- | UAGAAAAGACCUGAUAAAGA | 259 | 5228-5250 | 27573617- |
| 1446266.1 | CUA | | | 27573639 | UUA | | | 27573639 |
| AD- | UCUUUAUCAGGUCUUUUC | 170 | 5227-5247 | 27573620- | UAAGAAAAGACCUGAUAAAG | 260 | 5227-5249 | 27573618- |
| 1446267.1 | UUA | | | 27573640 | AUU | | | 27573640 |
| AD- | CUUUAUCAGGUCUUUUCU | 171 | 5226-5246 | 27573621- | UCAAGAAAAGACCUGAUAAA | 261 | 5226-5248 | 27573619- |
| 1446268.1 | UGA | | | 27573641 | GAU | | | 27573641 |
| AD- | UUUAUCAGGUCUUUUCUU | 172 | 5225-5245 | 27573622- | UACAAGAAAAGACCUGAUAA | 262 | 5225-5247 | 27573620- |
| 1446269.1 | GUA | | | 27573642 | AGA | | | 27573642 |
| AD- | UUAUCAGGUCUUUUCUUG | 173 | 5224-5244 | 27573623- | UAACAAGAAAAGACCUGAUA | 263 | 5224-5246 | 27573621- |
| 1446270.1 | UUA | | | 27573643 | AAG | | | 27573643 |
| AD- | UAUCAGGUCUUUUCUUGU | 174 | 5223-5243 | 27573624- | UGAACAAGAAAAGACCUGAU | 1412 | 5223-5245 | 27573622- |
| 1446271.1 | UCA | | | 27573644 | AAA | | | 27573644 |
| AD- | AUCAGGUCUUUUCUUGUU | 175 | 5222-5242 | 27573625- | UUGAACAAGAAAAGACCUGA | 265 | 5222-5244 | 27573623- |
| 1446272.1 | CAA | | | 27573645 | UAA | | | 27573645 |
| AD- | UCAGGUCUUUUCUUGUUC | 176 | 5221-5241 | 27573626- | UGUGAACAAGAAAAGACCUG | 266 | 5221-5243 | 27573624- |
| 1446273.1 | ACA | | | 27573646 | AUA | | | 27573646 |
| AD- | CAGGUCUUUUCUUGUUCA | 177 | 5220-5240 | 27573627- | UGGUGAACAAGAAAAGACCU | 267 | 5220-5242 | 27573625- |
| 1446274.1 | CCA | | | 27573647 | GAU | | | 27573647 |
| AD- | GGUCUUUUCUUGUUCACC | 178 | 5218-5238 | 27573629- | UAGGGUGAACAAGAAAAGAC | 268 | 5218-5240 | 27573627- |
| 1446275.1 | CUA | | | 27573649 | CUG | | | 27573649 |
| AD- | UCUUUUCUUGUUCACCCUC | 179 | 5216-5236 | 27573631- | UUGAGGGUGAACAAGAAAAG | 269 | 5216-5238 | 27573629- |
| 1446276.1 | AA | | | 27573651 | ACC | | | 27573651 |
| AD- | CUUUUCUUGUUCACCCUCA | 180 | 5215-5235 | 27573632- | UCUGAGGGUGAACAAGAAAA | 270 | 5215-5237 | 27573630- |
| 1446277.1 | GA | | | 27573652 | GAC | | | 27573652 |
| AD- | UUUUCUUGUUCACCCUCA | 181 | 5214-5234 | 27573633- | UGCUGAGGGUGAACAAGAAA | 271 | 5214-5236 | 27573631- |
| 1446278.1 | GCA | | | 27573653 | AGA | | | 27573653 |
| AD- | UUCUUGUUCACCCUCAGCG | 182 | 5212-5232 | 27573635- | UUCGCUGAGGGUGAACAAGA | 272 | 5212-5234 | 27573633- |
| 1446279.1 | AA | | | 27573655 | AAA | | | 27573655 |
| AD- | CCUCAGCGAGUACUGUGA | 183 | 5201-5221 | 27573646- | UUCUCACAGUACUCGCUGAG | 273 | 5201-5223 | 27573644- |
| 1446280.1 | GAA | | | 27573666 | GGU | | | 27573666 |
| AD- | UCAGCGAGUACUGUGAGA | 184 | 5199-5219 | 27573648- | UGCUCUCACAGUACUCGCUG | 274 | 5199-5221 | 27573646- |
| 1446281.1 | GCA | | | 27573668 | AGG | | | 27573668 |
| AD- | CAGCGAGUACUGUGAGAG | 185 | 5198-5218 | 27573649- | UUGCUCTCACAGUACUCGCUG | 275 | 5198-5220 | 27573647- |
| 1446282.1 | CAA | | | 27573669 | AG | | | 27573669 |
| AD- | AGCGAGUACUGUGAGAGC | 186 | 5197-5217 | 27573650- | UUUGCUCUCACAGUACUCGC | 276 | 5197-5219 | 27573648- |
| 1446283.1 | AAA | | | 27573670 | UGA | | | 27573670 |
| AD- | GCGAGUACUGUGAGAGCA | 187 | 5196-5216 | 27573651- | UCUUGCTCUCACAGUACUCGC | 277 | 5196-5218 | 27573649- |
| 1446284.1 | AGA | | | 27573671 | UG | | | 27573671 |
| AD- | CGAGUACUGUGAGAGCAA | 188 | 5195-5215 | 27573652- | UACUUGCUCUCACAGUACUC | 278 | 5195-5217 | 27573650- |
| 1446285.1 | GUA | | | 27573672 | GCU | | | 27573672 |
| AD- | GAGUACUGUGAGAGCAAG | 189 | 5194-5214 | 27573653- | UUACUUGCUCUCACAGUACU | 279 | 5194-5216 | 27573651- |
| 1446286.1 | UAA | | | 27573673 | CGC | | | 27573673 |
| AD- | AGUACUGUGAGAGCAAGU | 190 | 5193-5213 | 27573654- | UCUACUUGCUCUCACAGUAC | 280 | 5193-5215 | 27573652- |
| 1446287.1 | AGA | | | 27573674 | UCG | | | 27573674 |
| AD- | UACUGUGAGAGCAAGUAG | 191 | 5191-5211 | 27573656- | UCACUACUUGCUCUCACAGU | 281 | 5191-5213 | 27573654- |
| 1446288.1 | UGA | | | 27573676 | ACU | | | 27573676 |
| AD- | AAAACAAAAACACACACC | 192 | 5155-5175 | 27573692- | UGAGGUGUGUGUUUUUGUUU | 282 | 5155-5177 | 27573690- |
| 1446289.1 | UCA | | | 27573712 | UUC | | | 27573712 |
| AD- | ACACCUCCUAAACCCACAC | 193 | 5142-5162 | 27573705- | UGGUGUGGGUUUAGGAGGUG | 283 | 5142-5164 | 27573703- |
| 1446290.1 | CA | | | 27573725 | UGU | | | 27573725 |
| AD- | ACCUCCUAAACCCACACCU | 194 | 5140-5160 | 27573707- | UCAGGUGUGGGUUUAGGAGG | 284 | 5140-5162 | 27573705- |
| 1446291.1 | GA | | | 27573727 | UGU | | | 27573727 |
| AD- | CUCCUAAACCCACACCUGC | 195 | 5138-5158 | 27573709- | UAGCAGGUGUGGGUUUAGGA | 285 | 5138-5160 | 27573707- |
| 1446292.1 | UA | | | 27573729 | GGU | | | 27573729 |
| AD- | CCACACCUGCUCUUGCUAG | 196 | 5129-5149 | 27573718- | UUCUAGCAAGAGCAGGUGUG | 286 | 5129-5151 | 27573716- |
| 1446293.1 | AA | | | 27573738 | GGU | | | 27573738 |
| AD- | CACACCUGCUCUUGCUAGA | 197 | 5128-5148 | 27573719- | UGUCUAGCAAGAGCAGGUGU | 287 | 5128-5150 | 27573717- |
| 1446294.1 | CA | | | 27573739 | GGG | | | 27573739 |
| AD- | ACACCUGCUCUUGCUAGAC | 198 | 5127-5147 | 27573720- | UGGUCUAGCAAGAGCAGGUG | 288 | 5127-5149 | 27573718- |
| 1446295.1 | CA | | | 27573740 | UGG | | | 27573740 |

TABLE 3
Modified Sense and Antisense Strand Sequences of dsRNA Agents Targeting the Antisense Strand of Intron la of Human C9orf72

| | | SEQ | | SEQ | | SEQ |
|---|---|---|---|---|---|---|
| Duplex | | ID | | ID | | ID |
| Name | Sense Sequence 5′ to 3′ | NO: | Antisense Sequence 5′ to 3′ | NO: | mRNA Target Sequence 5′ to 3′ | NO: |
| AD- | cscsgag(Ghd)CfuCfCfCfuuuucucgsasa | 289 | VPusUfscgaGfaAfAfagggAfgCfcucggsgsu | 379 | ACCCGAGGCUCCCUUUUCUCGAG | 469 |
| 1446206.1 | | | | | | |
| AD- | asgsgca(Ahd)UfuCfCfAfccagucgcsusa | 290 | VPusAfsgcgAfcUfGfguggAfaUfugccusgsc | 380 | GCAGGCAAUUCCACCAGUCGCUA | 470 |
| 1446207.1 | | | | | | |
| AD- | csascca(Ghd)UfcGfCfUfagaggcgasasa | 291 | VPusUfsucgc(C2p)ucuagcGfaCfuggugsgsa | 381 | UCCACCAGUCGCUAGAGGCGAAA | 471 |
| 1446208.1 | | | | | | |
| AD- | ascscag(Uhd)CfgCfUfAfgaggcgaasasa | 292 | VPusUfsuucg(C2p)cucuagCfgAfcuggusgsg | 382 | CCACCAGUCGCUAGAGGCGAAAG | 472 |
| 1446209.1 | | | | | | |
| AD- | csasccc(Ahd)GfcUfUfCfggucagagsasa | 293 | VPusUfscucu(G2p)accgaaGfcUfgggugsusc | 383 | GACACCCAGCUUCGGUCAGAGAA | 473 |
| 1446210.1 | | | | | | |
| AD- | cscscag(Chd)UfuCfGfGfucagagaasasa | 294 | VPusUfsuucu(C2p)ugaccgAfaGfcugggsusg | 384 | CACCCAGCUUCGGUCAGAGAAAU | 474 |
| 1446211.1 | | | | | | |
| AD- | csasgcu(Uhd)CfgGfUfCfagagaaausgsa | 295 | VPusCfsauuu(C2p)ucugacCfgAfagcugsgsg | 385 | CCCAGCUUCGGUCAGAGAAAUGA | 475 |
| 1446212.1 | | | | | | |
| AD- | gscsuuc(Ghd)GfuCfAfGfagaaaugasgsa | 296 | VPusCfsucaUfuUfCfucugAfcCfgaagcsusg | 386 | CAGCUUCGGUCAGAGAAAUGAGA | 476 |
| 1446213.1 | | | | | | |
| AD- | uscsggu(Chd)AfgAfGfAfaaugagagsgsa | 297 | VPusCfscucu(C2p)auuucuCfuGfaccgasasg | 387 | CUUCGGUCAGAGAAAUGAGAGGG | 477 |
| 1446214.1 | | | | | | |
| AD- | gsgsuca(Ghd)AfgAfAfAfugagagggsasa | 298 | VPusUfscccu(C2p)ucauuuCfuCfugaccsgsa | 388 | UCGGUCAGAGAAAUGAGAGGGAA | 478 |
| 1446215.1 | | | | | | |
| AD- | uscsaga(Ghd)AfaAfUfGfagagggaasasa | 299 | VPusUfsuucc(C2p)ucucauUfuCfucugascsc | 389 | GGUCAGAGAAAUGAGAGGGAAAG | 479 |
| 1446216.1 | | | | | | |
| AD- | asgsagg(Ghd)AfaAfGfUfaaaaaugcsgsa | 300 | VPusCfsgcaUfuUfUfuacuUfuCfccucuscsa | 390 | UGAGAGGGAAAGUAAAAAUGCGU | 480 |
| 1446217.1 | | | | | | |
| AD- | gsasggg(Ahd)AfaGfUfAfaaaaugcgsusa | 301 | VPusAfscgcAfuUfUfuuacUfuUfcccucsusc | 391 | GAGAGGGAAAGUAAAAAUGCGUC | 481 |
| 1446218.1 | | | | | | |
| AD- | asgsgga(Ahd)AfgUfAfAfaaaugcguscsa | 302 | VPusGfsacgCfaUfUfuuuaCfuUfucccuscsu | 392 | AGAGGGAAAGUAAAAAUGCGUCG | 482 |
| 1446219.1 | | | | | | |
| AD- | gsgsgaa(Ahd)GfuAfAfAfaaugcgucsgsa | 303 | VPusCfsgacGfcAfUfuuuuAfcUfuucccsusc | 393 | GAGGGAAAGUAAAAAUGCGUCGA | 483 |
| 1446220.1 | | | | | | |
| AD- | gsgsaaa(Ghd)UfaAfAfAfaugcgucgsasa | 304 | VPusUfscgaCfgCfAfuuuuUfaCfuuuccscsu | 394 | AGGGAAAGUAAAAAUGCGUCGAG | 484 |
| 1446221.1 | | | | | | |
| AD- | gsasaag(Uhd)AfaAfAfAfugcgucgasgsa | 305 | VPusCfsucgAfcGfCfauuuUfuAfcuuucscsc | 395 | GGGAAAGUAAAAAUGCGUCGAGC | 485 |
| 1446222.1 | | | | | | |
| AD- | asasagu(Ahd)AfaAfAfUfgcgucgagscsa | 306 | VPusGfscucGfaCfGfcauuUfuUfacuuuscsc | 396 | GGAAAGUAAAAAUGCGUCGAGCU | 486 |
| 1446223.1 | | | | | | |
| AD- | asasgua(Ahd)AfaAfUfGfcgucgagcsusa | 307 | VPusAfsgcuCfgAfCfgcauUfuUfuacuususc | 397 | GAAAGUAAAAAUGCGUCGAGCUC | 487 |
| 1446224.1 | | | | | | |
| AD- | asgsuaa(Ahd)AfaUfGfCfgucgagcuscsa | 308 | VPusGfsagcu(C2p)gacgcaUfuUfuuacususu | 398 | AAAGUAAAAAUGCGUCGAGCUCU | 488 |
| 1446225.1 | | | | | | |
| AD- | csgsacu(Chd)CfuGfAfGfuuccagagscsa | 309 | VPusGfscucu(G2p)gaacucAfgGfagucgscsg | 399 | CGCGACUCCUGAGUUCCAGAGCU | 489 |
| 1446226.1 | | | | | | |
| AD- | gsascuc(Chd)UfgAfGfUfuccagagcsusa | 310 | VPusAfsgcuc(Tgn)ggaacuCfaGfgagucsgsc | 400 | GCGACUCCUGAGUUCCAGAGCUU | 490 |
| 1446227.1 | | | | | | |
| AD- | ascsucc(Uhd)GfaGfUfUfccagagcususa | 311 | VPusAfsagcu(C2p)uggaacUfcAfggaguscsg | 401 | CGACUCCUGAGUUCCAGAGCUUG | 491 |
| 1446228.1 | | | | | | |
| AD- | csusccu(Ghd)AfgUfUfCfcagagcuusgsa | 312 | VPusCfsaagc(Tgn)cuggaaCfuCfaggagsusc | 402 | GACUCCUGAGUUCCAGAGCUUGC | 492 |
| 1446229.1 | | | | | | |
| AD- | uscscug(Ahd)GfuUfCfCfagagcuugscsa | 313 | VPusGfscaag(C2p)ucuggaAfcUfcaggasgsu | 403 | ACUCCUGAGUUCCAGAGCUUGCU | 493 |
| 1446230.1 | | | | | | |
| AD- | cscsuga(Ghd)UfuCfCfAfgagcuugcsusa | 314 | VPusAfsgcaa(G2p)cucuggAfaCfucaggsasg | 404 | CUCCUGAGUUCCAGAGCUUGCUA | 494 |
| 1446231.1 | | | | | | |
| AD- | gsasguu(Chd)CfaGfAfGfcuugcuacsasa | 315 | VPusUfsguag(C2p)aagcucUfgGfaacucsasg | 405 | CUGAGUUCCAGAGCUUGCUACAG | 495 |
| 1446232.1 | | | | | | |
| AD- | asgsuuc(Chd)AfgAfGfCfuugcuacasgsa | 316 | VPusCfsugua(G2p)caagcuCfuGfgaacuscsa | 406 | UGAGUUCCAGAGCUUGCUACAGG | 496 |
| 1446233.1 | | | | | | |
| AD- | gsusucc(Ahd)GfaGfCfUfugcuacagsgsa | 317 | VPusCfscugUfaGfCfaagcUfcUfggaacsusc | 407 | GAGUUCCAGAGCUUGCUACAGGC | 497 |
| 1446234.1 | | | | | | |
| AD- | ususcca(Ghd)AfgCfUfUfgcuacaggscsa | 318 | VPusGfsccug(Tgn)agcaagCfuCfuggaascsu | 408 | AGUUCCAGAGCUUGCUACAGGCU | 498 |
| 1446235.1 | | | | | | |
| AD- | uscscag(Ahd)GfcUfUfGfcuacaggcsusa | 319 | VPusAfsgccu(G2p)uagcaaGfcUfcuggasasc | 409 | GUUCCAGAGCUUGCUACAGGCUG | 499 |
| 1446236.1 | | | | | | |
| AD- | cscsaga(Ghd)CfuUfGfCfuacaggcusgsa | 320 | VPusCfsagcc(Tgn)guagcaAfgCfucuggsasa | 410 | UUCCAGAGCUUGCUACAGGCUGC | 500 |
| 1446237.1 | | | | | | |
| AD- | csasgag(Chd)UfuGfCfUfacaggcugscsa | 321 | VPusGfscagc(C2p)uguagcAfaGfcucugsgsa | 411 | UCCAGAGCUUGCUACAGGCUGCG | 501 |
| 1446238.1 | | | | | | |
| AD- | usascag(Ghd)CfuGfCfGfguuguuucscsa | 322 | VPusGfsgaaa(C2p)aaccgcAfgCfcuguasgsc | 412 | GCUACAGGCUGCGGUUGUUUCCC | 502 |
| 1446239.1 | | | | | | |
| AD- | gscsugc(Ghd)GfuUfGfUfuucccuccsusa | 323 | VPusAfsggag(G2p)gaaacaAfcCfgcagcscsu | 413 | AGGCUGCGGUUGUUUCCCUCCUU | 503 |
| 1446240.1 | | | | | | |
| AD- | csusgcg(Ghd)UfuGfUfUfucccuccususa | 324 | VPusAfsagga(G2p)ggaaacAfaCfcgcagscsc | 414 | GGCUGCGGUUGUUUCCCUCCUUG | 504 |
| 1446241.1 | | | | | | |
| AD- | gscsggu(Uhd)GfuUfUfCfccuccuugsusa | 325 | VPusAfscaag(G2p)agggaaAfcAfaccgcsasg | 415 | CUGCGGUUGUUUCCCUCCUUGUU | 505 |
| 1446242.1 | | | | | | |
| AD- | csgsguu(Ghd)UfuUfCfCfcuccuugususa | 326 | VPusAfsacaAfgGfAfgggaAfaCfaaccgscsa | 416 | UGCGGUUGUUUCCCUCCUUGUUU | 506 |
| 1446243.1 | | | | | | |
| AD- | gsusugu(Uhd)UfcCfCfUfccuuguuususa | 327 | VPusAfsaaaCfaAfGfgaggGfaAfacaacscsg | 417 | CGGUUGUUUCCCUCCUUGUUUUC | 507 |
| 1446244.1 | | | | | | |
| AD- | ususguu(Uhd)CfcCfUfCfcuuguuuuscsa | 328 | VPusGfsaaaAfcAfAfggagGfgAfaacaascsc | 418 | GGUUGUUUCCCUCCUUGUUUUCU | 508 |
| 1446245.1 | | | | | | |
| AD- | ususccc(Uhd)CfcUfUfGfuuuucuucsusa | 329 | VPusAfsgaaGfaAfAfacaaGfgAfgggaasasc | 419 | GUUUCCCUCCUUGUUUUCUUCUG | 509 |
| 1446246.1 | | | | | | |
| AD- | uscsccu(Chd)CfuUfGfUfuuucuucusgsa | 330 | VPusCfsagaAfgAfAfaacaAfgGfagggasasa | 420 | UUUCCCUCCUUGUUUUCUUCUGG | 510 |
| 1446247.1 | | | | | | |
| AD- | cscscuc(Chd)UfuGfUfUfuucuucugsgsa | 331 | VPusCfscagAfaGfAfaaacAfaGfgagggsasa | 421 | UUCCCUCCUUGUUUUCUUCUGGU | 511 |
| 1446248.1 | | | | | | |
| AD- | cscsucc(Uhd)UfgUfUfUfucuucuggsusa | 332 | VPusAfsccaGfaAfGfaaaaCfaAfggaggsgsa | 422 | UCCCUCCUUGUUUUCUUCUGGUU | 512 |
| 1446249.1 | | | | | | |
| AD- | csusccu(Uhd)GfuUfUfUfcuucuggususa | 333 | VPusAfsaccAfgAfAfgaaaAfcAfaggagsgsg | 423 | CCCUCCUUGUUUUCUUCUGGUUA | 513 |
| 1446250.1 | | | | | | |
| AD- | cscsuug(Uhd)UfuUfCfUfucugguuasasa | 334 | VPusUfsuaac(C2p)agaagaAfaAfcaaggsasg | 424 | CUCCUUGUUUUCUUCUGGUUAAU | 514 |
| 1446251.1 | | | | | | |
| AD- | csusugu(Uhd)UfuCfUfUfcugguuaasusa | 335 | VPusAfsuuaAfcCfAfgaagAfaAfacaagsgsa | 425 | UCCUUGUUUUCUUCUGGUUAAUC | 515 |
| 1446252.1 | | | | | | |
| AD- | ususguu(Uhd)UfcUfUfCfugguuaauscsa | 336 | VPusGfsauuAfaCfCfagaaGfaAfaacaasgsg | 426 | CCUUGUUUUCUUCUGGUUAAUCU | 516 |
| 1446253.1 | | | | | | |
| AD- | usgsuuu(Uhd)CfuUfCfUfgguuaaucsusa | 337 | VPusAfsgauUfaAfCfcagaAfgAfaaacasasg | 427 | CUUGUUUUCUUCUGGUUAAUCUU | 517 |
| 1446254.1 | | | | | | |
| AD- | gsusuuu(Chd)UfuCfUfGfguuaaucususa | 338 | VPusAfsagaUfuAfAfccagAfaGfaaaacsasa | 428 | UUGUUUUCUUCUGGUUAAUCUUU | 518 |
| 1446255.1 | | | | | | |
| AD- | ususcuu(Chd)UfgGfUfUfaaucuuuasusa | 339 | VPusAfsuaaAfgAfUfuaacCfaGfaagaasasa | 429 | UUUUCUUCUGGUUAAUCUUUAUC | 519 |
| 1446256.1 | | | | | | |
| AD- | uscsuuc(Uhd)GfgUfUfAfaucuuuauscsa | 340 | VPusGfsauaAfaGfAfuuaaCfcAfgaagasasa | 430 | UUUCUUCUGGUUAAUCUUUAUCA | 520 |
| 1446257.1 | | | | | | |
| AD- | csusucu(Ghd)GfuUfAfAfucuuuaucsasa | 341 | VPusUfsgauAfaAfGfauuaAfcCfagaagsasa | 431 | UUCUUCUGGUUAAUCUUUAUCAG | 521 |
| 1446258.1 | | | | | | |
| AD- | ususcug(Ghd)UfuAfAfUfcuuuaucasgsa | 342 | VPusCfsugaUfaAfAfgauuAfaCfcagaasgsa | 432 | UCUUCUGGUUAAUCUUUAUCAGG | 522 |
| 1446259.1 | | | | | | |
| AD- | uscsugg(Uhd)UfaAfUfCfuuuaucagsgsa | 343 | VPusCfscugAfuAfAfagauUfaAfccagasasg | 433 | CUUCUGGUUAAUCUUUAUCAGGU | 523 |
| 1446260.1 | | | | | | |
| AD- | csusggu(Uhd)AfaUfCfUfuuaucaggsusa | 344 | VPusAfsccug(Agn)uaaagaUfuAfaccagsasa | 434 | UUCUGGUUAAUCUUUAUCAGGUC | 524 |
| 1446261.1 | | | | | | |
| AD- | usgsguu(Ahd)AfuCfUfUfuaucagguscsa | 345 | VPusGfsaccu(G2p)auaaagAfuUfaaccasgsa | 435 | UCUGGUUAAUCUUUAUCAGGUCU | 525 |
| 1446262.1 | | | | | | |
| AD- | gsusuaa(Uhd)CfuUfUfAfucaggucususa | 346 | VPusAfsagac(C2p)ugauaaAfgAfuuaacscsa | 436 | UGGUUAAUCUUUAUCAGGUCUUU | 526 |
| 1446263.1 | | | | | | |
| AD- | ususaau(Chd)UfuUfAfUfcaggucuususa | 347 | VPusAfsaaga(C2p)cugauaAfaGfauuaascsc | 437 | GGUUAAUCUUUAUCAGGUCUUUU | 527 |
| 1446264.1 | | | | | | |
| AD- | asasucu(Uhd)UfaUfCfAfggucuuuuscsa | 348 | VPusGfsaaaAfgAfCfcugaUfaAfagauusasa | 438 | UUAAUCUUUAUCAGGUCUUUUCU | 528 |
| 1446265.1 | | | | | | |
| AD- | asuscuu(Uhd)AfuCfAfGfgucuuuucsusa | 349 | VPusAfsgaaAfaGfAfccugAfuAfaagaususa | 439 | UAAUCUUUAUCAGGUCUUUUCUU | 529 |
| 1446266.1 | | | | | | |
| AD- | uscsuuu(Ahd)UfcAfGfGfucuuuucususa | 350 | VPusAfsagaAfaAfGfaccuGfaUfaaagasusu | 440 | AAUCUUUAUCAGGUCUUUUCUUG | 530 |
| 1446267.1 | | | | | | |
| AD- | csusuua(Uhd)CfaGfGfUfcuuuucuusgsa | 351 | VPusCfsaagAfaAfAfgaccUfgAfuaaagsasu | 441 | AUCUUUAUCAGGUCUUUUCUUGU | 531 |
| 1446268.1 | | | | | | |
| AD- | ususuau(Chd)AfgGfUfCfuuuucuugsusa | 352 | VPusAfscaaGfaAfAfagacCfuGfauaaasgsa | 442 | UCUUUAUCAGGUCUUUUCUUGUU | 532 |
| 1446269.1 | | | | | | |
| AD- | ususauc(Ahd)GfgUfCfUfuuucuugususa | 353 | VPusAfsacaAfgAfAfaagaCfcUfgauaasasg | 443 | CUUUAUCAGGUCUUUUCUUGUUC | 533 |
| 1446270.1 | | | | | | |
| AD- | usasuca(Ghd)GfuCfUfUfuucuuguuscsa | 354 | VPusGfsaacAfaGfAfaaagAfcCfugauasasa | 444 | UUUAUCAGGUCUUUUCUUGUUCA | 534 |
| 1446271.1 | | | | | | |
| AD- | asuscag(Ghd)UfcUfUfUfucuuguucsasa | 355 | VPusUfsgaaCfaAfGfaaaaGfaCfcugausasa | 445 | UUAUCAGGUCUUUUCUUGUUCAC | 535 |
| 1446272.1 | | | | | | |
| AD- | uscsagg(Uhd)CfuUfUfUfcuuguucascsa | 356 | VPusGfsugaa(C2p)aagaaaAfgAfccugasusa | 446 | UAUCAGGUCUUUUCUUGUUCACC | 536 |
| 1446273.1 | | | | | | |
| AD- | csasggu(Chd)UfuUfUfCfuuguucacscsa | 357 | VPusGfsguga(Agn)caagaaAfaGfaccugsasu | 447 | AUCAGGUCUUUUCUUGUUCACCC | 537 |
| 1446274.1 | | | | | | |
| AD- | gsgsucu(Uhd)UfuCfUfUfguucacccsusa | 358 | VPusAfsgggu(G2p)aacaagAfaAfagaccsusg | 448 | CAGGUCUUUUCUUGUUCACCCUC | 538 |
| 1446275.1 | | | | | | |
| AD- | uscsuuu(Uhd)CfuUfGfUfucacccucsasa | 359 | VPusUfsgagg(G2p)ugaacaAfgAfaaagascsc | 449 | GGUCUUUUCUUGUUCACCCUCAG | 539 |
| 1446276.1 | | | | | | |
| AD- | csusuuu(Chd)UfuGfUfUfcacccucasgsa | 360 | VPusCfsugag(G2p)gugaacAfaGfaaaagsasc | 450 | GUCUUUUCUUGUUCACCCUCAGC | 540 |
| 1446277.1 | | | | | | |
| AD- | ususuuc(Uhd)UfgUfUfCfacccucagscsa | 361 | VPusGfscuga(G2p)ggugaaCfaAfgaaaasgsa | 451 | UCUUUUCUUGUUCACCCUCAGCG | 541 |
| 1446278.1 | | | | | | |
| AD- | ususcuu(Ghd)UfuCfAfCfccucagcgsasa | 362 | VPusUfscgcu(G2p)agggugAfaCfaagaasasa | 452 | UUUUCUUGUUCACCCUCAGCGAG | 542 |
| 1446279.1 | | | | | | |
| AD- | cscsuca(Ghd)CfgAfGfUfacugugagsasa | 363 | VPusUfscuca(C2p)aguacuCfgCfugaggsgsu | 453 | ACCCUCAGCGAGUACUGUGAGAG | 543 |
| 1446280.1 | | | | | | |
| AD- | uscsagc(Ghd)AfgUfAfCfugugagagscsa | 364 | VPusGfscucu(C2p)acaguaCfuCfgcugasgsg | 454 | CCUCAGCGAGUACUGUGAGAGCA | 544 |
| 1446281.1 | | | | | | |
| AD- | csasgcg(Ahd)GfuAfCfUfgugagagcsasa | 365 | VPusUfsgcuc(Tgn)cacaguAfcUfcgcugsasg | 455 | CUCAGCGAGUACUGUGAGAGCAA | 545 |
| 1446282.1 | | | | | | |
| AD- | asgscga(Ghd)UfaCfUfGfugagagcasasa | 366 | VPusUfsugcu(C2p)ucacagUfaCfucgcusgsa | 456 | UCAGCGAGUACUGUGAGAGCAAG | 546 |
| 1446283.1 | | | | | | |
| AD- | gscsgag(Uhd)AfcUfGfUfgagagcaasgsa | 367 | VPusCfsuugc(Tgn)cucacaGfuAfcucgcsusg | 457 | CAGCGAGUACUGUGAGAGCAAGU | 547 |
| 1446284.1 | | | | | | |
| AD- | csgsagu(Ahd)CfuGfUfGfagagcaagsusa | 368 | VPusAfscuug(C2p)ucucacAfgUfacucgscsu | 458 | AGCGAGUACUGUGAGAGCAAGUA | 548 |
| 1446285.1 | | | | | | |
| AD- | gsasgua(Chd)UfgUfGfAfgagcaagusasa | 369 | VPusUfsacuu(G2p)cucucaCfaGfuacucsgsc | 459 | GCGAGUACUGUGAGAGCAAGUAG | 549 |
| 1446286.1 | | | | | | |
| AD- | asgsuac(Uhd)GfuGfAfGfagcaaguasgsa | 370 | VPusCfsuacUfuGfCfucucAfcAfguacuscsg | 460 | CGAGUACUGUGAGAGCAAGUAGU | 550 |
| 1446287.1 | | | | | | |
| AD- | usascug(Uhd)GfaGfAfGfcaaguagusgsa | 371 | VPusCfsacuAfcUfUfgcucUfcAfcaguascsu | 461 | AGUACUGUGAGAGCAAGUAGUGG | 551 |
| 1446288.1 | | | | | | |
| AD- | asasaac(Ahd)AfaAfAfCfacacaccuscsa | 372 | VPusGfsaggu(G2p)uguguuUfuUfguuuususc | 462 | GAAAAACAAAAACACACACCUCC | 552 |
| 1446289.1 | | | | | | |
| AD- | ascsacc(Uhd)CfcUfAfAfacccacacscsa | 373 | VPusGfsgugu(G2p)gguuuaGfgAfggugusgsu | 463 | ACACACCUCCUAAACCCACACCU | 553 |
| 1446290.1 | | | | | | |
| AD- | ascscuc(Chd)UfaAfAfCfccacaccusgsa | 374 | VPusCfsaggu(G2p)uggguuUfaGfgaggusgsu | 464 | ACACCUCCUAAACCCACACCUGC | 554 |
| 1446291.1 | | | | | | |
| AD- | csusccu(Ahd)AfaCfCfCfacaccugcsusa | 375 | VPusAfsgcag(G2p)ugugggUfuUfaggagsgsu | 465 | ACCUCCUAAACCCACACCUGCUC | 555 |
| 1446292.1 | | | | | | |
| AD- | cscsaca(Chd)CfuGfCfUfcuugcuagsasa | 376 | VPusUfscuag(C2p)aagagcAfgGfuguggsgsu | 466 | ACCCACACCUGCUCUUGCUAGAC | 556 |
| 1446293.1 | | | | | | |
| AD- | csascac(Chd)UfgCfUfCfuugcuagascsa | 377 | VPusGfsucua(G2p)caagagCfaGfgugugsgsg | 467 | CCCACACCUGCUCUUGCUAGACC | 557 |
| 1446294.1 | | | | | | |
| AD- | ascsacc(Uhd)GfcUfCfUfugcuagacscsa | 378 | VPusGfsgucu(Agn)gcaagaGfcAfggugusgsg | 468 | CCACACCUGCUCUUGCUAGACCC | 558 |
| 1446295.1 | | | | | | |

TABLE 4
Single Dose Screen of dsRNA Agents Targeting the Antisense
Strand of Intron 1a of Human C9orf72 in Cos-7 Cells

| | 10 nM % | | 1 nM % | | 0.1 nM % | |
|---|---|---|---|---|---|---|
| | Message* | | Message* | | Message* | |
| Duplex | Remaining | STDEV | Remaining | STDEV | Remaining | STDEV |
| AD-1446206.1 | 45 | 9 | 65 | 12 | 85 | 18 |
| AD-1446207.1 | 18 | 4 | 23 | 3 | 38 | 4 |
| AD-1446208.1 | 51 | 5 | 52 | 8 | 68 | 15 |
| AD-1446209.1 | 77 | 11 | 81 | 15 | 95 | 9 |
| AD-1446210.1 | 81 | 24 | 98 | 10 | 102 | 10 |
| AD-1446211.1 | 19 | 3 | 25 | 2 | 39 | 7 |
| AD-1446212.1 | 64 | 11 | 61 | 6 | 83 | 7 |
| AD-1446213.1 | 9 | 2 | 11 | 1 | 20 | 2 |
| AD-1446214.1 | 18 | 1 | 23 | 3 | 30 | 5 |
| AD-1446215.1 | 18 | 5 | 18 | 4 | 28 | 9 |
| AD-1446216.1 | 15 | 3 | 18 | 4 | 28 | 5 |
| AD-1446217.1 | 14 | 3 | 17 | 2 | 26 | 2 |
| AD-1446218.1 | 12 | 1 | 15 | 1 | 22 | 7 |
| AD-1446219.1 | 12 | 3 | 19 | 4 | 24 | 5 |
| AD-1446220.1 | 15 | 4 | 21 | 3 | 28 | 5 |
| AD-1446221.1 | 7 | 0 | 11 | 2 | 17 | 5 |
| AD-1446222.1 | 10 | 2 | 16 | 4 | 26 | 6 |
| AD-1446223.1 | 11 | 1 | 18 | 6 | 37 | 4 |
| AD-1446224.1 | 15 | 2 | 20 | 3 | 34 | 7 |
| AD-1446225.1 | 17 | 3 | 25 | 2 | 42 | 5 |
| AD-1446226.1 | 19 | 4 | 22 | 3 | 28 | 2 |
| AD-1446227.1 | 16 | 7 | 22 | 5 | 31 | 7 |
| AD-1446228.1 | 25 | 8 | 28 | 6 | 42 | 9 |
| AD-1446229.1 | 16 | 3 | 21 | 2 | 31 | 2 |
| AD-1446230.1 | 21 | 2 | 20 | 6 | 28 | 3 |
| AD-1446231.1 | 17 | 1 | 22 | 4 | 25 | 4 |
| AD-1446232.1 | 11 | 2 | 18 | 4 | 22 | 2 |
| AD-1446233.1 | 16 | 1 | 23 | 3 | 32 | 6 |
| AD-1446234.1 | 18 | 3 | 26 | 3 | 34 | 7 |
| AD-1446235.1 | 30 | 9 | 37 | 5 | 53 | 8 |
| AD-1446236.1 | 66 | 12 | 82 | 11 | 105 | 25 |
| AD-1446237.1 | 23 | 4 | 34 | 5 | 49 | 5 |
| AD-1446238.1 | 44 | 8 | 41 | 12 | 49 | 7 |
| AD-1446239.1 | 53 | 9 | 61 | 8 | 74 | 7 |
| AD-1446240.1 | 25 | 5 | 33 | 8 | 44 | 4 |
| AD-1446241.1 | 23 | 4 | 31 | 7 | 38 | 6 |
| AD-1446242.1 | 12 | 2 | 16 | 4 | 26 | 3 |
| AD-1446243.1 | 18 | 1 | 22 | 2 | 27 | 2 |
| AD-1446244.1 | 53 | 7 | 44 | 7 | 51 | 16 |
| AD-1446245.1 | 18 | 2 | 16 | 1 | 22 | 2 |
| AD-1446246.1 | 7 | 1 | 10 | 1 | 13 | 3 |
| AD-1446247.1 | 7 | 1 | 9 | 1 | 12 | 2 |
| AD-1446248.1 | 5 | 1 | 6 | 1 | 9 | 3 |
| AD-1446249.1 | 7 | 1 | 9 | 2 | 12 | 2 |
| AD-1446250.1 | 12 | 1 | 14 | 2 | 17 | 4 |
| AD-1446251.1 | 7 | 2 | 7 | 0 | 10 | 2 |
| AD-1446252.1 | 4 | 1 | 4 | 1 | 6 | 4 |
| AD-1446253.1 | 1 | 1 | 4 | 1 | 7 | 3 |
| AD-1446254.1 | 6 | 3 | 5 | 0 | 7 | 3 |
| AD-1446255.1 | 11 | 2 | 7 | 1 | 9 | 1 |
| AD-1446256.1 | 34 | 7 | 27 | 4 | 31 | 2 |
| AD-1446257.1 | 5 | 1 | 5 | 0 | 6 | 1 |
| AD-1446258.1 | 5 | 2 | 4 | 1 | 6 | 1 |
| AD-1446259.1 | 6 | 2 | 7 | 1 | 8 | 1 |
| AD-1446260.1 | 4 | 1 | 4 | 1 | 5 | 1 |
| AD-1446261.1 | 10 | 4 | 9 | 1 | 10 | 2 |
| AD-1446262.1 | 6 | 1 | 6 | 0 | 7 | 1 |
| AD-1446263.1 | 5 | 1 | 6 | 1 | 9 | 2 |
| AD-1446264.1 | 11 | 4 | 8 | 1 | 9 | 1 |
| AD-1446265.1 | 6 | 1 | 6 | 1 | 7 | 1 |
| AD-1446266.1 | 6 | 1 | 6 | 0 | 8 | 2 |
| AD-1446267.1 | 8 | 4 | 8 | 3 | 11 | 1 |
| AD-1446268.1 | 4 | 1 | 3 | 1 | 6 | 1 |
| AD-1446269.1 | 5 | 1 | 6 | 0 | 7 | 2 |
| AD-1446270.1 | 5 | 1 | 7 | 3 | 8 | 2 |
| AD-1446271.1 | 3 | 1 | 4 | 2 | 7 | 1 |
| AD-1446272.1 | 8 | 4 | 7 | 1 | 9 | 2 |
| AD-1446273.1 | 6 | 2 | 8 | 2 | 10 | 1 |
| AD-1446274.1 | 5 | 2 | 6 | 1 | 9 | 2 |
| AD-1446275.1 | 10 | 3 | 15 | 5 | 17 | 3 |
| AD-1446276.1 | 6 | 1 | 6 | 1 | 8 | 2 |
| AD-1446277.1 | 12 | 1 | 12 | 1 | 16 | 4 |
| AD-1446278.1 | 16 | 2 | 16 | 2 | 22 | 7 |
| AD-1446279.1 | 23 | 3 | 19 | 3 | 28 | 4 |
| AD-1446280.1 | 20 | 8 | 30 | 12 | 40 | 14 |
| AD-1446281.1 | 21 | 4 | 31 | 3 | 51 | 14 |
| AD-1446282.1 | 18 | 5 | 17 | 4 | 40 | 9 |
| AD-1446283.1 | 44 | 6 | 32 | 7 | 50 | 14 |
| AD-1446284.1 | 25 | 8 | 31 | 3 | 52 | 13 |
| AD-1446285.1 | 38 | 9 | 49 | 4 | 52 | 11 |
| AD-1446286.1 | 28 | 6 | 48 | 8 | 67 | 15 |
| AD-1446287.1 | 64 | 19 | 56 | 10 | 72 | 13 |
| AD-1446288.1 | 34 | 5 | 34 | 7 | 54 | 10 |
| AD-1446289.1 | 17 | 1 | 21 | 3 | 35 | 9 |
| AD-1446290.1 | 40 | 2 | 61 | 10 | 76 | 12 |
| AD-1446291.1 | 60 | 9 | 69 | 5 | 89 | 16 |
| AD-1446292.1 | 23 | 2 | 32 | 5 | 38 | 6 |
| AD-1446293.1 | 20 | 6 | 32 | 4 | 44 | 4 |
| AD-1446294.1 | 11 | 2 | 21 | 2 | 33 | 4 |
| AD-1446295.1 | 23 | 5 | 34 | 6 | 53 | 6 |

*“message” for this example is an antisense transcript

TABLE 4A
C90RF72 INTRON-1A Antisense RNA target sequences having ≤50% antisense
transcript remaining for dosing at 0.1 nM as measured in Table 4.

| | | | SEQ |
|---|---|---|---|
| Target | Target | RNA Target Sequence | ID |
| Start | End | (Reverse Complement of NG_031977.2) | NO.: |
| 5523 | 5571 | CAGCTTCGGTCAGAGAAATGAGAGGGAAAGTAA | 21 |
| | | AAATGCGTCGAGCTCT | |
| 5283 | 5315 | CGCGACTCCTGAGTTCCAGAGCTTGCTACAGGC | 22 |
| 5260 | 5286 | AGGCTGCGGTTGTTTCCCTCCTTGTTT | 23 |
| 5201 | 5279 | GGTTGTTTCCCTCCTTGTTTTCTTCTGGTTAATCTT | 24 |
| | | TATCAGGTCTTTTCTTGTTCACCCTCAGCGAGTAC | |
| | | TGTGAGAG | |
| 5197 | 5220 | CTCAGCGAGTACTGTGAGAGCAAG | 25 |
| 5128 | 5160 | ACCTCCTAAACCCACACCTGCTCTTGCTAGACC | 26 |

TABLE 4B
C9ORF72 INTRON-1A Antisense RNA target sequences having ≤40% antisense
transcript remaining for dosing at 0.1 nM as measured in Table 4.

| | | | SEQ |
|---|---|---|---|
| Target | Target | RNA Target Sequence | ID |
| Start | End | (Reverse Complement of NG_031977.2) | NO.: |
| 5524 | 5571 | CAGCTTCGGTCAGAGAAATGAGAGGGAAAGTAA | 27 |
| | | AAATGCGTCGAGCTC | |
| 5292 | 5315 | CGCGACTCCTGAGTTCCAGAGCTT | 28 |
| 5283 | 5312 | GACTCCTGAGTTCCAGAGCTTGCTACAGGC | 29 |
| 5260 | 5285 | GGCTGCGGTTGTTTCCCTCCTTGTTT | 30 |
| 5201 | 5279 | GGTTGTTTCCCTCCTTGTTTTCTTCTGGTTAATCTT | 31 |
| | | TATCAGGTCTTTTCTTGTTCACCCTCAGCGAGTAC | |
| | | TGTGAGAG | |

TABLE 4C
C9ORF72 INTRON-1A Antisense RNA target sequences having ≤30% antisense
transcript remaining for dosing at 0.1 nM as measured in Table 4.

| | | | SEQ |
|---|---|---|---|
| Target | Target | RNA Target Sequence | ID |
| Start | End | (Reverse Complement of NG_031977.2) | NO.: |
| 5526 | 5571 | CAGCTTCGGTCAGAGAAATGAGAGGGAAAGTAA | 32 |
| | | AAATGCGTCGAGC | |
| 5285 | 5311 | ACTCCTGAGTTCCAGAGCTTGCTACAG | 33 |
| 5260 | 5283 | CTGCGGTTGTTTCCCTCCTTGTTT | 34 |
| 5243 | 5279 | GGTTGTTTCCCTCCTTGTTTTCTTCTGGTTAATCT | 35 |
| | | TT | |
| 5212 | 5261 | TTTCTTCTGGTTAATCTTTATCAGGTCTTTTCTTG | 36 |
| | | TTCACCCTCAGCGAG | |

TABLE 4D
C9ORF72 INTRON-1A Antisense RNA target sequences having ≤25% antisense
transcript remaining for dosing at 0.1 nM as measured in Table 4.

| | | | SEQ |
|---|---|---|---|
| Target | Target | RNA Target Sequence | ID |
| Start | End | (Reverse Complement of NG_031977.2) | NO.: |
| 5529 | 5552 | GAGAGGGAAAGTAAAAATGCGTCG | 37 |
| 5243 | 5279 | GGTTGTTTCCCTCCTTGTTTTCTTCTGGTTAATCTT | 38 |
| | | T | |
| 5214 | 5261 | TTTCTTCTGGTTAATCTTTATCAGGTCTTTTCTTGT | 39 |
| | | TCACCCTCAGCG | |

TABLE 4E
C9ORF72 INTRON-1A Antisense RNA target sequences having ≤20% antisense
transcript remaining for dosing at 0.1 nM as measured in Table 4.

| | | | SEQ |
|---|---|---|---|
| Target | Target | RNA Target Sequence | ID |
| Start | End | (Reverse Complement of NG_031977.2) | NO.: |
| 5243 | 5275 | GTTTCCCTCCTTGTTTTCTTCTGGTTAATCTTT | 40 |
| 5215 | 5261 | TTTCTTCTGGTTAATCTTTATCAGGTCTTTTCTT | 41 |
| | | GTTCACCCTCAGC | |

TABLE 4F
C9ORF72 INTRON-1A Antisense RNA target sequences having ≤15% antisense
transcript remaining for dosing at 0.1 nM as measured in Table 4.

| | | | SEQ |
|---|---|---|---|
| Target | Target | RNA Target Sequence | ID |
| Start | End | (Reverse Complement of NG_031977.2) | NO.: |
| 5250 | 5275 | GTTTCCCTCCTTGTTTTCTTCTGGTT | 42 |
| 5243 | 5269 | CTCCTTGTTTTCTTCTGGTTAATCTTT | 43 |
| 5220 | 5261 | TTTCTTCTGGTTAATCTTTATCAGGTCTTTTCTT | 44 |
| | | GTTCACCC | |

TABLE 4G
C9ORF72 INTRON-1A Antisense RNA target sequences having ≤10% antisense
transcript remaining for dosing at 0.1 nM as measured in Table 4.

| | | | SEQ |
|---|---|---|---|
| Target | Target | RNA Target Sequence | ID |
| Start | End | (Reverse Complement of NG_031977.2) | NO.: |
| 5243 | 5268 | TCCTTGTTTTCTTCTGGTTAATCTTT | 45 |
| 5228 | 5261 | TTTCTTCTGGTTAATCTTTATCAGGTCTTTTCTT | 46 |
| 5220 | 5248 | ATCTTTATCAGGTCTTTTCTTGTTCACCC | 47 |

TABLE 5
Unmodified Sense and Antisense Strand Sequences of dsRNA Agents Targeting the Sense Strand of Either Exon 1A or Downstream of
the Intronic Repeat Between Exons 1A and 1B¹.

| | | SEQ | | | | SEQ | | |
|---|---|---|---|---|---|---|---|---|
| Duplex | Sense Sequence | ID | Range | Range | | ID | Range | Range |
| Name | 5′ to 3′ | NO: | (NM_001256054.2) | (NG_031977.2) | Antisense Sequence 5′ to 3′ | NO: | (NM_001256054.2) | (NG_031977.2) |
| AD- | GUAACCUACGGUGUCC | 559 | 3 to 23 | 5003-5023 | UAGCGGGACACCGUAG | 707 | 1 to 23 | 5001-5023 |
| 1446073.1 | CGCUA | | | | GUUACGU | | | |
| AD- | GUCCCGCUAGGAAAGA | 560 | 15-35 | 5015-5035 | UCCUCUCUUUCCUAGCG | 708 | 13-35 | 5013-5035 |
| 1446074.1 | GAGGA | | | | GGACAC | | | |
| AD- | CCCGCUAGGAAAGAGA | 561 | 17-37 | 5017-5037 | UCACCUCUCUUUCCUAG | 709 | 15-37 | 5015-5037 |
| 1446075.1 | GGUGA | | | | CGGGAC | | | |
| AD- | CGCUAGGAAAGAGAG | 562 | 19-39 | 5019-5039 | UCGCACCUCUCUUUCCU | 710 | 17-39 | 5017-5039 |
| 1446076.1 | GUGCGA | | | | AGCGGG | | | |
| AD- | GCUAGGAAAGAGAGG | 563 | 20-40 | 5020-5040 | UACGCACCUCUCUUUCC | 711 | 18-40 | 5018-5040 |
| 1446077.1 | UGCGUA | | | | UAGCGG | | | |
| AD- | UAGGAAAGAGAGGUG | 564 | 22-42 | 5022-5042 | UUGACGCACCUCUCUUU | 712 | 20-42 | 5020-5042 |
| 1446078.1 | CGUCAA | | | | CCUAGC | | | |
| AD- | AGGUGCGUCAAACAGC | 565 | 32-52 | 5032-5052 | UUGUCGCUGUUUGACG | 713 | 30-52 | 5030-5052 |
| 1446079.1 | GACAA | | | | CACCUCU | | | |
| AD- | GGUGCGUCAAACAGCG | 566 | 33-53 | 5033-5053 | UUUGUCGCUGUUUGAC | 714 | 31-53 | 5031-5053 |
| 1446080.1 | ACAAA | | | | GCACCUC | | | |
| AD- | GUGCGUCAAACAGCGA | 567 | 34-54 | 5034-5054 | UCUUGUCGCUGUUUGA | 715 | 32-54 | 5032-5054 |
| 1446081.1 | CAAGA | | | | CGCACCU | | | |
| AD- | UGCGUCAAACAGCGAC | 568 | 35-55 | 5035-5055 | UACUUGTCGCUGUUUG | 716 | 33-55 | 5033-5055 |
| 1285246.2 | AAGUA | | | | ACGCACC | | | |
| AD- | UGCGUCAAACAGCGAC | 568 | 35-55 | 5035-5055 | UACUUGTCGCUGUUUG | 716 | 33-55 | 5033-5055 |
| 1285246.1 | AAGUA | | | | ACGCACC | | | |
| AD- | GCGUCAAACAGCGACA | 569 | 36-56 | 5036-5056 | UAACUUGUCGCUGUUU | 717 | 34-56 | 5034-5056 |
| 1446082.1 | AGUUA | | | | GACGCAC | | | |
| AD- | CGUCAAACAGCGACAA | 570 | 37-57 | 5037-5057 | UGAACUTGUCGCUGUU | 718 | 35-57 | 5035-5057 |
| 1285245.2 | GUUCA | | | | UGACGCA | | | |
| AD- | CGUCAAACAGCGACAA | 570 | 37-57 | 5037-5057 | UGAACUTGUCGCUGUU | 718 | 35-57 | 5035-5057 |
| 1285245.1 | GUUCA | | | | UGACGCA | | | |
| AD- | GUCAAACAGCGACAAG | 571 | 38-58 | 5038-5058 | UGGAACTUGUCGCUGU | 719 | 36-58 | 5036-5058 |
| 1446083.1 | UUCCA | | | | UUGACGC | | | |
| AD- | UCAAACAGCGACAAGU | 572 | 39-59 | 5039-5059 | UCGGAACUUGUCGCUG | 720 | 37-59 | 5037-5059 |
| 1446084.1 | UCCGA | | | | UUUGACG | | | |
| AD- | CCGCCCACGUAAAAGA | 573 | 56-76 | 5056-5076 | UGUCAUCUUUUACGUG | 721 | 54-76 | 5054-5076 |
| 1446085.1 | UGACA | | | | GGCGGAA | | | |
| AD- | CCACGUAAAAGAUGAC | 574 | 60-80 | 5060-5080 | UAAGCGUCAUCUUUUA | 722 | 58-80 | 5058-5080 |
| 1446086.1 | GCUUA | | | | CGUGGGC | | | |
| AD- | CCACGUAAAAGAUGAC | 574 | 60-80 | 5060-5080 | UAAGCGTCAUCUUUUAC | 723 | 58-80 | 5058-5080 |
| 1285247.1 | GCUUA | | | | GUGGGC | | | |
| AD- | CACGUAAAAGAUGACG | 575 | 61-81 | 5061-5081 | UCAAGCGUCAUCUUUU | 724 | 59-81 | 5059-5081 |
| 1446087.1 | CUUGA | | | | ACGUGGG | | | |
| AD- | ACGUAAAAGAUGACGC | 576 | 62-82 | 5062-5082 | UCCAAGCGUCAUCUUU | 725 | 60-82 | 5060-5082 |
| 1446088.1 | UUGGA | | | | UACGUGG | | | |
| AD- | CGUAAAAGAUGACGCU | 577 | 63-83 | 5063-5083 | UACCAAGCGUCAUCUU | 726 | 61-83 | 5061-5083 |
| 1446089.1 | UGGUA | | | | UUACGUG | | | |
| AD- | GUAAAAGAUGACGCU | 578 | 64-84 | 5064-5084 | UCACCAAGCGUCAUCUU | 727 | 62-84 | 5062-5084 |
| 1446090.1 | UGGUGA | | | | UUACGU | | | |
| AD- | UAAAAGAUGACGCUU | 579 | 65-85 | 5065-5085 | UACACCAAGCGUCAUCU | 728 | 63-85 | 5063-5085 |
| 1446091.1 | GGUGUA | | | | UUUACG | | | |
| AD- | AAAAGAUGACGCUUG | 580 | 66-86 | 5066-5086 | UCACACCAAGCGUCAUC | 729 | 64-86 | 5064-5086 |
| 1446092.1 | GUGUGA | | | | UUUUAC | | | |
| AD- | AAAGAUGACGCUUGG | 581 | 67-87 | 5067-5087 | UACACACCAAGCGUCAU | 730 | 65-87 | 5065-5087 |
| 1446093.1 | UGUGUA | | | | CUUUUA | | | |
| AD- | AGAUGACGCUUGGUG | 582 | 69-89 | 5069-5089 | UUGACACACCAAGCGUC | 731 | 67-89 | 5067-5089 |
| 1446094.1 | UGUCAA | | | | AUCUUU | | | |
| AD- | AUGACGCUUGGUGUG | 583 | 71-91 | 5071-5091 | UGCUGACACACCAAGCG | 732 | 69-91 | 5069-5091 |
| 1446095.1 | UCAGCA | | | | UCAUCU | | | |
| AD- | GACGCUUGGUGUGUCA | 584 | 73-93 | 5073-5093 | UCGGCUGACACACCAAG | 733 | 71-93 | 5071-5093 |
| 1446096.1 | GCCGA | | | | CGUCAU | | | |
| AD- | GCUGCCCGGUUGCUUC | 585 | 98-118 | 5098-5118 | UAAGAGAAGCAACCGG | 734 | 96-118 | 5096-5118 |
| 1446097.1 | UCUUA | | | | GCAGCAG | | | |
| AD- | GUCUAGCAAGAGCAGG | 586 | 129-149 | 5129-5149 | UCACACCUGCUCUUGCU | 735 | 127-149 | 5127-5149 |
| 1446098.1 | UGUGA | | | | AGACCC | | | |
| AD- | GCAGGUGUGGGUUUA | 587 | 140-160 | 5140-5160 | UCCUCCUAAACCCACAC | 736 | 138-160 | 5138-5160 |
| 1446099.1 | GGAGGA | | | | CUGCUC | | | |
| AD- | CAGGUGUGGGUUUAG | 588 | 141-161 | 5141-5161 | UACCUCCUAAACCCACA | 737 | 139-161 | 5139-5161 |
| 1446100.1 | GAGGUA | | | | CCUGCU | | | |
| AD- | AGGUGUGGGUUUAGG | 589 | 142-162 | 5142-5162 | UCACCUCCUAAACCCAC | 738 | 140-162 | 5140-5162 |
| 1446101.1 | AGGUGA | | | | ACCUGC | | | |
| AD- | GUGUGGGUUUAGGAG | 590 | 144-164 | 5144-5164 | UCACACCUCCUAAACCC | 739 | 142-164 | 5142-5164 |
| 1446102.1 | GUGUGA | | | | ACACCU | | | |
| AD- | UGCUCUCACAGUACUC | 591 | | 5199-5219 | UCAGCGAGUACUGUGA | 1292 | | 5197-5219 |
| 1285244.1 | GCUGA | | | | GAGCAAG | | | |
| AD- | UCUCACAGUACUCGCU | 592 | | 5202-5222 | UCCUCAGCGAGUACUG | 740 | | 5200-5222 |
| 1446103.1 | GAGGA | | | | UGAGAGC | | | |
| AD- | UCACAGUACUCGCUGA | 593 | | 5204-5224 | UACCCUCAGCGAGUACU | 741 | | 5202-5224 |
| 1446104.1 | GGGUA | | | | GUGAGA | | | |
| AD- | GCUGAGGGUGAACAA | 594 | | 5215-5235 | UUUUUCUUGUUCACCC | 742 | | 5213-5235 |
| 1285235.1 | GAAAAA | | | | UCAGCGA | | | |
| AD- | AACAAGAAAAGACCUG | 595 | | 5225-5245 | UUUAUCAGGUCUUUUC | 1422 | | 5223-5245 |
| 1285238.1 | AUAAA | | | | UUGUUCA | | | |
| AD- | AAGAAAAGACCUGAU | 596 | | 5228-5248 | UUCUUUAUCAGGUCUU | 743 | | 5226-5248 |
| 1285243.1 | AAAGAA | | | | UUCUUGU | | | |
| AD- | AGAAAAGACCUGAUA | 597 | | 5229-5249 | UAUCUUUAUCAGGUCU | 744 | | 5227-5249 |
| 1285234.1 | AAGAUA | | | | UUUCUUG | | | |
| AD- | GAAAAGACCUGAUAA | 598 | | 5230-5250 | UAAUCUUUAUCAGGUC | 1420 | | 5228-5250 |
| 1285239.1 | AGAUUA | | | | UUUUCUU | | | |
| AD- | AAAAGACCUGAUAAA | 599 | | 5231-5251 | UUAAUCUUUAUCAGGU | 1419 | | 5229-5251 |
| 1285232.1 | GAUUAA | | | | CUUUUCU | | | |
| AD- | AAAGACCUGAUAAAG | 600 | | 5232-5252 | UUUAAUCUUUAUCAGG | 745 | | 5230-5252 |
| 1285231.1 | AUUAAA | | | | UCUUUUC | | | |
| AD- | AAGACCUGAUAAAGA | 601 | | 5233-5253 | UGUUAAUCUUUAUCAG | 746 | | 5231-5253 |
| 1285240.1 | UUAACA | | | | GUCUUUU | | | |
| AD- | GACCUGAUAAAGAUU | 602 | | 5235-5255 | UUGGUUAAUCUUUAUC | 747 | | 5233-5255 |
| 1285241.1 | AACCAA | | | | AGGUCUU | | | |
| AD- | ACCUGAUAAAGAUUA | 603 | | 5236-5256 | UCUGGUUAAUCUUUAU | 1418 | | 5234-5256 |
| 1285242.1 | ACCAGA | | | | CAGGUCU | | | |
| AD- | AAAGAUUAACCAGAA | 604 | | 5243-5263 | UUUUUCUUCUGGUUAA | 748 | | 5241-5263 |
| 1285233.1 | GAAAAA | | | | UCUUUAU | | | |
| AD- | AUUAACCAGAAGAAA | 605 | | 5247-5267 | UCUUGUUUUCUUCUGG | 749 | | 5245-5267 |
| 1285237.1 | ACAAGA | | | | UUAAUCU | | | |
| AD- | AACCAGAAGAAAACAA | 606 | | 5250-5270 | UCUCCUUGUUUUCUUC | 750 | | 5248-5270 |
| 1285236.1 | GGAGA | | | | UGGUUAA | | | |
| AD- | GGAGGGAAACAACCGC | 607 | | 5266-5286 | UGGCUGCGGUUGUUUC | 751 | | 5264-5286 |
| 1446105.1 | AGCCA | | | | CCUCCUU | | | |
| AD- | GAGGGAAACAACCGCA | 608 | | 5267-5287 | UAGGCUGCGGUUGUUU | 752 | | 5265-5287 |
| 1446106.1 | GCCUA | | | | CCCUCCU | | | |
| AD- | CAGCCUGUAGCAAGCU | 609 | | 5281-5301 | UCCAGAGCUUGCUACA | 1415 | | 5279-5301 |
| 1446107.1 | CUGGA | | | | GGCUGCG | | | |
| AD- | CUCUGGAACUCAGGAG | 610 | | 5295-5315 | UGCGACTCCUGAGUUCC | 753 | | 5293-5315 |
| 1446108.1 | UCGCA | | | | AGAGCU | | | |
| AD- | UCUCCUCAGAGCUCGA | 611 | | 5516-5536 | UUGCGUCGAGCUCUGA | 754 | | 5514-5536 |
| 1446109.1 | CGCAA | | | | GGAGAGC | | | |
| AD- | UCCUCAGAGCUCGACG | 612 | | 5518-5538 | UAAUGCGUCGAGCUCU | 755 | | 5516-5538 |
| 1446110.1 | CAUUA | | | | GAGGAGA | | | |
| AD- | ACUUUCCCUCUCAUUU | 613 | | 5541-5561 | UAGAGAAAUGAGAGGG | 756 | | 5539-5561 |
| 1446111.1 | CUCUA | | | | AAAGUAA | | | |
| AD- | CUUUCCCUCUCAUUUC | 614 | | 5542-5562 | UCAGAGAAAUGAGAGG | 757 | | 5540-5562 |
| 1446112.1 | UCUGA | | | | GAAAGUA | | | |
| AD- | UUUCCCUCUCAUUUCU | 615 | | 5543-5563 | UUCAGAGAAAUGAGAG | 758 | | 5541-5563 |
| 1446113.1 | CUGAA | | | | GGAAAGU | | | |
| AD- | UCCCUCUCAUUUCUCU | 616 | | 5545-5565 | UGGUCAGAGAAAUGAG | 759 | | 5543-5565 |
| 1446114.1 | GACCA | | | | AGGGAAA | | | |
| AD- | CCCUCUCAUUUCUCUG | 617 | | 5546-5566 | UCGGUCAGAGAAAUGA | 1414 | | 5544-5566 |
| 1446115.1 | ACCGA | | | | GAGGGAA | | | |
| AD- | CCUCUCAUUUCUCUGA | 618 | | 5547-5567 | UUCGGUCAGAGAAAUG | 760 | | 5545-5567 |
| 1446116.1 | CCGAA | | | | AGAGGGA | | | |
| AD- | UCUCAUUUCUCUGACC | 619 | | 5549-5569 | UCUUCGGUCAGAGAAA | 761 | | 5547-5569 |
| 1446117.1 | GAAGA | | | | UGAGAGG | | | |
| AD- | CUCAUUUCUCUGACCG | 620 | | 5550-5570 | UGCUUCGGUCAGAGAA | 762 | | 5548-5570 |
| 1446118.1 | AAGCA | | | | AUGAGAG | | | |
| AD- | UCAUUUCUCUGACCGA | 621 | | 5551-5571 | UAGCUUCGGUCAGAGA | 763 | | 5549-5571 |
| 1446119.1 | AGCUA | | | | AAUGAGA | | | |
| AD- | CUCUGACCGAAGCUGG | 622 | | 5557-5577 | UACACCCAGCUUCGGUC | 764 | | 5555-5577 |
| 1446120.1 | GUGUA | | | | AGAGAA | | | |
| AD- | GGUGUCGGGCUUUCGC | 623 | | 5572-5592 | UAGAGGCGAAAGCCCG | 765 | | 5570-5592 |
| 1446121.1 | CUCUA | | | | ACACCCA | | | |
| AD- | UCGGGCUUUCGCCUCU | 624 | | 5576-5596 | UCGCUAGAGGCGAAAG | 766 | | 5574-5596 |
| 1446122.1 | AGCGA | | | | CCCGACA | | | |
| AD- | CUUUCGCCUCUAGCGA | 625 | | 5581-5601 | UCCAGUCGCUAGAGGC | 767 | | 5579-5601 |
| 1446123.1 | CUGGA | | | | GAAAGCC | | | |
| AD- | UUCGCCUCUAGCGACU | 626 | | 5583-5603 | UCACCAGUCGCUAGAG | 768 | | 5581-5603 |
| 1446124.1 | GGUGA | | | | GCGAAAG | | | |
| AD- | UCGCCUCUAGCGACUG | 627 | | 5584-5604 | UCCACCAGUCGCUAGAG | 1413 | | 5582-5604 |
| 1446125.1 | GUGGA | | | | GCGAAA | | | |
| AD- | CGCCUCUAGCGACUGG | 628 | | 5585-5605 | UUCCACCAGUCGCUAGA | 769 | | 5583-5605 |
| 1446126.1 | UGGAA | | | | GGCGAA | | | |
| AD- | GCCUCUAGCGACUGGU | 629 | | 5586-5606 | UUUCCACCAGUCGCUAG | 770 | | 5584-5606 |
| 1446127.1 | GGAAA | | | | AGGCGA | | | |
| AD- | CUCUAGCGACUGGUGG | 630 | | 5588-5608 | UAAUUCCACCAGUCGCU | 771 | | 5586-5608 |
| 1446128.1 | AAUUA | | | | AGAGGC | | | |
| AD- | UCUAGCGACUGGUGGA | 631 | | 5589-5609 | UCAAUUCCACCAGUCGC | 772 | | 5587-5609 |
| 1446129.1 | AUUGA | | | | UAGAGG | | | |
| AD- | GACUGGUGGAAUUGCC | 632 | | 5595-5615 | UUGCAGGCAAUUCCACC | 773 | | 5593-5615 |
| 1446130.1 | UGCAA | | | | AGUCGC | | | |
| AD- | ACUGGUGGAAUUGCCU | 633 | | 5596-5616 | UAUGCAGGCAAUUCCA | 774 | | 5594-5616 |
| 1446131.1 | GCAUA | | | | CCAGUCG | | | |
| AD- | UGGUGGAAUUGCCUGC | 634 | | 5598-5618 | UGGAUGCAGGCAAUUC | 775 | | 5596-5618 |
| 1446132.1 | AUCCA | | | | CACCAGU | | | |
| AD- | UCUGGCCUCUUCCUUG | 635 | | 5678-5698 | UAAAGCAAGGAAGAGG | 776 | | 5676-5698 |
| 1446134.1 | CUUUA | | | | CCAGAUC | | | |
| AD- | CUGGCCUCUUCCUUGC | 636 | | 5679-5699 | UGAAAGCAAGGAAGAG | 777 | | 5677-5699 |
| 1446135.1 | UUUCA | | | | GCCAGAU | | | |
| AD- | UGGCCUCUUCCUUGCU | 637 | | 5680-5700 | UGGAAAGCAAGGAAGA | 778 | | 5678-5700 |
| 1446136.1 | UUCCA | | | | GGCCAGA | | | |
| AD- | GGCCUCUUCCUUGCUU | 638 | | 5681-5701 | UGGGAAAGCAAGGAAG | 779 | | 5679-5701 |
| 1446137.1 | UCCCA | | | | AGGCCAG | | | |
| AD- | GCCUCUUCCUUGCUUU | 639 | | 5682-5702 | UCGGGAAAGCAAGGAA | 780 | | 5680-5702 |
| 1446138.1 | CCCGA | | | | GAGGCCA | | | |
| AD- | UUCCUUGCUUUCCCGC | 640 | | 5687-5707 | UGAGGGCGGGAAAGCA | 781 | | 5685-5707 |
| 1446139.1 | CCUCA | | | | AGGAAGA | | | |
| AD- | UCCUUGCUUUCCCGCC | 641 | | 5688-5708 | UUGAGGGCGGGAAAGC | 782 | | 5686-5708 |
| 1446140.1 | CUCAA | | | | AAGGAAG | | | |
| AD- | CCUUGCUUUCCCGCCC | 642 | | 5689-5709 | UCUGAGGGCGGGAAAG | 783 | | 5687-5709 |
| 1446141.1 | UCAGA | | | | CAAGGAA | | | |
| AD- | CUUGCUUUCCCGCCCU | 643 | | 5690-5710 | UACUGAGGGCGGGAAA | 784 | | 5688-5710 |
| 1446142.1 | CAGUA | | | | GCAAGGA | | | |
| AD- | AGUACCCGAGCUGUCU | 644 | | 5707-5727 | UAAGGAGACAGCUCGG | 785 | | 5705-5727 |
| 1446143.1 | CCUUA | | | | GUACUGA | | | |
| AD- | UACCCGAGCUGUCUCC | 645 | | 5709-5729 | UGGAAGGAGACAGCUC | 786 | | 5707-5729 |
| 1446144.1 | UUCCA | | | | GGGUACU | | | |
| AD- | GAGGAGAUCAUGCGG | 646 | | 5885-5905 | UUCAUCCCGCAUGAUCU | 787 | | 5883-5905 |
| 1446145.1 | GAUGAA | | | | CCUCGC | | | |
| AD- | AGACGCCUGCACAAUU | 647 | | 5918-5938 | UCUGAAAUUGUGCAGG | 788 | | 5916-5938 |
| 1446146.1 | UCAGA | | | | CGUCUCC | | | |
| AD- | GACGCCUGCACAAUUU | 648 | | 5919-5939 | UGCUGAAAUUGUGCAG | 789 | | 5917-5939 |
| 1446147.1 | CAGCA | | | | GCGUCUC | | | |
| AD- | CGCCUGCACAAUUUCA | 649 | | 5921-5941 | UGGGCUGAAAUUGUGC | 790 | | 5919-5941 |
| 1446148.1 | GCCCA | | | | AGGCGUC | | | |
| AD- | CCUGCACAAUUUCAGC | 650 | | 5923-5943 | UUUGGGCUGAAAUUGU | 791 | | 5921-5943 |
| 1446149.1 | CCAAA | | | | GCAGGCG | | | |
| AD- | CUGCACAAUUUCAGCC | 651 | | 5924-5944 | UCUUGGGCUGAAAUUG | 792 | | 5922-5944 |
| 1446150.1 | CAAGA | | | | UGCAGGC | | | |
| AD- | UGCACAAUUUCAGCCC | 652 | | 5925-5945 | UGCUUGGGCUGAAAUU | 793 | | 5923-5945 |
| 1446151.1 | AAGCA | | | | GUGCAGG | | | |
| AD- | CAAUUUCAGCCCAAGC | 653 | | 5929-5949 | UAGAAGCUUGGGCUGA | 794 | | 5927-5949 |
| 1446152.1 | UUCUA | | | | AAUUGUG | | | |
| AD- | AAUUUCAGCCCAAGCU | 654 | | 5930-5950 | UUAGAAGCUUGGGCUG | 795 | | 5928-5950 |
| 1446153.1 | UCUAA | | | | AAAUUGU | | | |
| AD- | CAGCCCAAGCUUCUAG | 655 | | 5935-5955 | UCUCUCTAGAAGCUUGG | 796 | | 5933-5955 |
| 1446154.1 | AGAGA | | | | GCUGAA | | | |
| AD- | AGCCCAAGCUUCUAGA | 656 | | 5936-5956 | UACUCUCUAGAAGCUU | 797 | | 5934-5956 |
| 1446155.1 | GAGUA | | | | GGGCUGA | | | |
| AD- | GCCCAAGCUUCUAGAG | 657 | | 5937-5957 | UCACUCTCUAGAAGCUU | 798 | | 5935-5957 |
| 1446156.1 | AGUGA | | | | GGGCUG | | | |
| AD- | CCCAAGCUUCUAGAGA | 658 | | 5938-5958 | UCCACUCUCUAGAAGCU | 799 | | 5936-5958 |
| 1446157.1 | GUGGA | | | | UGGGCU | | | |
| AD- | CCAAGCUUCUAGAGAG | 659 | | 5939-5959 | UACCACTCUCUAGAAGC | 800 | | 5937-5959 |
| 1446158.1 | UGGUA | | | | UUGGGC | | | |
| AD- | CAAGCUUCUAGAGAGU | 660 | | 5940-5960 | UCACCACUCUCUAGAAG | 801 | | 5938-5960 |
| 1446159.1 | GGUGA | | | | CUUGGG | | | |
| AD- | AAGCUUCUAGAGAGU | 661 | | 5941-5961 | UUCACCACUCUCUAGAA | 802 | | 5939-5961 |
| 1446160.1 | GGUGAA | | | | GCUUGG | | | |
| AD- | AGCUUCUAGAGAGUG | 662 | | 5942-5962 | UAUCACCACUCUCUAGA | 803 | | 5940-5962 |
| 1446161.1 | GUGAUA | | | | AGCUUG | | | |
| AD- | GCUUCUAGAGAGUGG | 663 | | 5943-5963 | UCAUCACCACUCUCUAG | 804 | | 5941-5963 |
| 1446162.1 | UGAUGA | | | | AAGCUU | | | |
| AD- | UUCUAGAGAGUGGUG | 664 | | 5945-5965 | UGUCAUCACCACUCUCU | 805 | | 5943-5965 |
| 1446163.1 | AUGACA | | | | AGAAGC | | | |
| AD- | UAGAGAGUGGUGAUG | 665 | | 5948-5968 | UCAAGUCAUCACCACUC | 806 | | 5946-5968 |
| 1446164.1 | ACUUGA | | | | UCUAGA | | | |
| AD- | AGAGAGUGGUGAUGA | 666 | | 5949-5969 | UGCAAGTCAUCACCACU | 807 | | 5947-5969 |
| 1446165.1 | CUUGCA | | | | CUCUAG | | | |
| AD- | GAGAGUGGUGAUGAC | 667 | | 5950-5970 | UUGCAAGUCAUCACCAC | 808 | | 5948-5970 |
| 1446166.1 | UUGCAA | | | | UCUCUA | | | |
| AD- | AGUGGUGAUGACUUG | 668 | | 5953-5973 | UAUAUGCAAGUCAUCA | 809 | | 5951-5973 |
| 1446167.1 | CAUAUA | | | | CCACUCU | | | |
| AD- | GGUGAUGACUUGCAU | 669 | | 5956-5976 | UCUCAUAUGCAAGUCA | 810 | | 5954-5976 |
| 1446168.1 | AUGAGA | | | | UCACCAC | | | |
| AD- | GUGAUGACUUGCAUA | 670 | | 5957-5977 | UCCUCAUAUGCAAGUC | 811 | | 5955-5977 |
| 1446169.1 | UGAGGA | | | | AUCACCA | | | |
| AD- | UGAUGACUUGCAUAU | 671 | | 5958-5978 | UCCCUCAUAUGCAAGUC | 812 | | 5956-5978 |
| 1446170.1 | GAGGGA | | | | AUCACC | | | |
| AD- | AGGGCAGCAAUGCAAG | 672 | | 5974-5994 | UCCGACUUGCAUUGCU | 813 | | 5972-5994 |
| 1446171.1 | UCGGA | | | | GCCCUCA | | | |
| AD- | GGGCAGCAAUGCAAGU | 673 | | 5975-5995 | UACCGACUUGCAUUGC | 814 | | 5973-5995 |
| 1446172.1 | CGGUA | | | | UGCCCUC | | | |
| AD- | GGCAGCAAUGCAAGUC | 674 | | 5976-5996 | UCACCGACUUGCAUUGC | 815 | | 5974-5996 |
| 1446173.1 | GGUGA | | | | UGCCCU | | | |
| AD- | GCAGCAAUGCAAGUCG | 675 | | 5977-5997 | UACACCGACUUGCAUU | 816 | | 5975-5997 |
| 1446174.1 | GUGUA | | | | GCUGCCC | | | |
| AD- | CAGCAAUGCAAGUCGG | 676 | | 5978-5998 | UCACACCGACUUGCAUU | 817 | | 5976-5998 |
| 1446175.1 | UGUGA | | | | GCUGCC | | | |
| AD- | CAAUGCAAGUCGGUGU | 677 | | 5981-6001 | UGAGCACACCGACUUGC | 818 | | 5979-6001 |
| 1446176.1 | GCUCA | | | | AUUGCU | | | |
| AD- | CUGUGGGACAUGACCU | 678 | | 6007-6027 | UAACCAGGUCAUGUCCC | 819 | | 6005-6027 |
| 1446177.1 | GGUUA | | | | ACAGAA | | | |
| AD- | UGUGGGACAUGACCUG | 679 | | 6008-6028 | UCAACCAGGUCAUGUCC | 820 | | 6006-6028 |
| 1446178.1 | GUUGA | | | | CACAGA | | | |
| AD- | GUGGGACAUGACCUGG | 680 | | 6009-6029 | UGCAACCAGGUCAUGU | 821 | | 6007-6029 |
| 1446179.1 | UUGCA | | | | CCCACAG | | | |
| AD- | UGGGACAUGACCUGGU | 681 | | 6010-6030 | UAGCAACCAGGUCAUG | 822 | | 6008-6030 |
| 1446180.1 | UGCUA | | | | UCCCACA | | | |
| AD- | GACAUGACCUGGUUGC | 682 | | 6013-6033 | UUGAAGCAACCAGGUC | 823 | | 6011-6033 |
| 1446181.1 | UUCAA | | | | AUGUCCC | | | |
| AD- | ACAUGACCUGGUUGCU | 683 | | 6014-6034 | UGUGAAGCAACCAGGU | 824 | | 6012-6034 |
| 1446182.1 | UCACA | | | | CAUGUCC | | | |
| AD- | UGACCUGGUUGCUUCA | 684 | | 6017-6037 | UGCUGUGAAGCAACCA | 825 | | 6015-6037 |
| 1446183.1 | CAGCA | | | | GGUCAUG | | | |
| AD- | GACCUGGUUGCUUCAC | 685 | | 6018-6038 | UAGCUGTGAAGCAACCA | 826 | | 6016-6038 |
| 1446184.1 | AGCUA | | | | GGUCAU | | | |
| AD- | ACCUGGUUGCUUCACA | 686 | | 6019-6039 | UGAGCUGUGAAGCAAC | 827 | | 6017-6039 |
| 1446185.1 | GCUCA | | | | CAGGUCA | | | |
| AD- | CCUGGUUGCUUCACAG | 687 | | 6020-6040 | UGGAGCTGUGAAGCAA | 828 | | 6018-6040 |
| 1446186.1 | CUCCA | | | | CCAGGUC | | | |
| AD- | CUGGUUGCUUCACAGC | 688 | | 6021-6041 | UCGGAGCUGUGAAGCA | 829 | | 6019-6041 |
| 1446187.1 | UCCGA | | | | ACCAGGU | | | |
| AD- | UGGUUGCUUCACAGCU | 689 | | 6022-6042 | UUCGGAGCUGUGAAGC | 830 | | 6020-6042 |
| 1446188.1 | CCGAA | | | | AACCAGG | | | |
| AD- | GGUUGCUUCACAGCUC | 690 | | 6023-6043 | UCUCGGAGCUGUGAAG | 831 | | 6021-6043 |
| 1446189.1 | CGAGA | | | | CAACCAG | | | |
| AD- | GUUGCUUCACAGCUCC | 691 | | 6024-6044 | UUCUCGGAGCUGUGAA | 832 | | 6022-6044 |
| 1446190.1 | GAGAA | | | | GCAACCA | | | |
| AD- | UUGCUUCACAGCUCCG | 692 | | 6025-6045 | UAUCUCGGAGCUGUGA | 833 | | 6023-6045 |
| 1446191.1 | AGAUA | | | | AGCAACC | | | |
| AD- | CAGCUCCGAGAUGACA | 693 | | 6033-6053 | UUCUGUGUCAUCUCGG | 834 | | 6031-6053 |
| 1446192.1 | CAGAA | | | | AGCUGUG | | | |
| AD- | GCUCCGAGAUGACACA | 694 | | 6035-6055 | UAGUCUGUGUCAUCUC | 835 | | 6033-6055 |
| 1446193.1 | GACUA | | | | GGAGCUG | | | |
| AD- | CUCCGAGAUGACACAG | 695 | | 6036-6056 | UAAGUCTGUGUCAUCUC | 836 | | 6034-6056 |
| 1446194.1 | ACUUA | | | | GGAGCU | | | |
| AD- | UCCGAGAUGACACAGA | 696 | | 6037-6057 | UCAAGUCUGUGUCAUC | 837 | | 6035-6057 |
| 1446195.1 | CUUGA | | | | UCGGAGC | | | |
| AD- | CCGAGAUGACACAGAC | 697 | | 6038-6058 | UGCAAGTCUGUGUCAUC | 838 | | 6036-6058 |
| 1446196.1 | UUGCA | | | | UCGGAG | | | |
| AD- | CGAGAUGACACAGACU | 698 | | 6039-6059 | UAGCAAGUCUGUGUCA | 839 | | 6037-6059 |
| 1446197.1 | UGCUA | | | | UCUCGGA | | | |
| AD- | GAGAUGACACAGACUU | 699 | | 6040-6060 | UAAGCAAGUCUGUGUC | 840 | | 6038-6060 |
| 1446198.1 | GCUUA | | | | AUCUCGG | | | |
| AD- | GAUGACACAGACUUGC | 700 | | 6042-6062 | UUUAAGCAAGUCUGUG | 841 | | 6040-6062 |
| 1446199.1 | UUAAA | | | | UCAUCUC | | | |
| AD- | AUGACACAGACUUGCU | 701 | | 6043-6063 | UUUUAAGCAAGUCUGU | 842 | | 6041-6063 |
| 1446200.1 | UAAAA | | | | GUCAUCU | | | |
| AD- | UGACACAGACUUGCUU | 702 | | 6044-6064 | UCUUUAAGCAAGUCUG | 843 | | 6042-6064 |
| 1446201.1 | AAAGA | | | | UGUCAUC | | | |
| AD- | GACACAGACUUGCUUA | 703 | | 6045-6065 | UCCUUUAAGCAAGUCU | 844 | | 6043-6065 |
| 1446202.1 | AAGGA | | | | GUGUCAU | | | |
| AD- | ACACAGACUUGCUUAA | 704 | | 6046-6066 | UUCCUUUAAGCAAGUC | 845 | | 6044-6066 |
| 1446203.1 | AGGAA | | | | UGUGUCA | | | |
| AD- | CAGACUUGCUUAAAGG | 705 | | 6049-6069 | UACUUCCUUUAAGCAA | 846 | | 6047-6069 |
| 1446204.1 | AAGUA | | | | GUCUGUG | | | |
| AD- | AGACUUGCUUAAAGG | 706 | | 6050-6070 | UCACUUCCUUUAAGCA | 847 | | 6048-6070 |
| 1446205.1 | AAGUGA | | | | AGUCUGU | | | |

¹Exons 1a and 1b correspond to positions 5001-5158 and 5386-5436 of NG_031977.2.

TABLE 6
Modified Sense and Antisense Strand Sequences of dsRNA Agents Targeting the Sense Strand of Either Exon 1A or the 3′-side of the
Intronic Repeat Between Exons 1A and 1B

| | | SEQ | | SEQ | | SEQ | | SEQ |
|---|---|---|---|---|---|---|---|---|
| Duplex | | ID | | ID | mRNA target sequence | ID | mRNA target sequence | ID |
| Name | Sense Seuence 5′ to 3′ | NO: | Antisense Sequence 5′ to 3′ | NO: | (NM_001256054.2) | NO: | (NG_031977.2) | NO: |
| AD- | gsusaac(Chd)UfaCfGfGfuguc | 848 | VPusAfsgcgg(G2p)acaccgUfaGfg | 996 | ACGUAACCUACGGU | 1145 | ACGUAACCUACGGUGUC | 1145 |
| 1446073.1 | ccgcsusa | | uuacsgsu | | GUCCCGCUA | | CCGCUA | |
| AD- | gsusccc(Ghd)CfuAfGfGfaaag | 849 | VPusCfscucu(C2p)uuuccuAfgCfg | 997 | GUGUCCCGCUAGGA | 1146 | GUGUCCCGCUAGGAAAG | 1146 |
| 1446074.1 | agagsgsa | | ggacsasc | | AAGAGAGGU | | AGAGGU | |
| AD- | cscscgc(Uhd)AfgGfAfAfaga | 850 | VPusCfsaccu(C2p)ucuuucCfuAfg | 998 | GUCCCGCUAGGAAA | 1147 | GUCCCGCUAGGAAAGAG | 1147 |
| 1446075.1 | gaggusgsa | | cgggsasc | | GAGAGGUGC | | AGGUGC | |
| AD- | csgscua(Ghd)GfaAfAfGfaga | 851 | VPusCfsgcaCfcUfCfucuuUfcCfua | 999 | CCCGCUAGGAAAGA | 1148 | CCCGCUAGGAAAGAGAG | 1148 |
| 1446076.1 | ggugcsgsa | | gcgsgsg | | GAGGUGCGU | | GUGCGU | |
| AD- | gscsuag(Ghd)AfaAfGfAfgag | 852 | VPusAfscgca(C2p)cucucuUfuCfc | 1000 | CCGCUAGGAAAGAG | 1149 | CCGCUAGGAAAGAGAGG | 1149 |
| 1446077.1 | gugcgsusa | | uagcsgsg | | AGGUGCGUC | | UGCGUC | |
| AD- | usasgga(Ahd)AfgAfGfAfggu | 853 | VPusUfsgacg(C2p)accucuCfuUfu | 1001 | GCUAGGAAAGAGAG | 1150 | GCUAGGAAAGAGAGGUG | 1150 |
| 1446078.1 | gcgucsasa | | ccuasgsc | | GUGCGUCAA | | CGUCAA | |
| AD- | asgsgug(Chd)GfuCfAfAfaca | 854 | VPusUfsgucg(C2p)uguuugAfcGfc | 1002 | AGAGGUGCGUCAAA | 1151 | AGAGGUGCGUCAAACAG | 1151 |
| 1446079.1 | gcgacsasa | | accuscsu | | CAGCGACAA | | CGACAA | |
| AD- | gsgsugc(Ghd)UfcAfAfAfcag | 855 | VPusUfsuguc(G2p)cuguuuGfaCfg | 1003 | GAGGUGCGUCAAAC | 1152 | GAGGUGCGUCAAACAGC | 1152 |
| 1446080.1 | cgacasasa | | caccsusc | | AGCGACAAG | | GACAAG | |
| AD- | gsusgcg(Uhd)CfaAfAfCfagc | 856 | VPusCfsuugu(C2p)gcuguuUfgAfc | 1004 | AGGUGCGUCAAACA | 1153 | AGGUGCGUCAAACAGCG | 1153 |
| 1446081.1 | gacaasgsa | | gcacscsu | | GCGACAAGU | | ACAAGU | |
| AD- | usgscgu(Chd)AfaAfCfAfgcg | 857 | VPusAfscuug(Tgn)cgcuguUfuGfa | 1005 | GGUGCGUCAAACAG | 1154 | GGUGCGUCAAACAGCGA | 1154 |
| 1285246.2 | acaagsusa | | cgcascsc | | CGACAAGUU | | CAAGUU | |
| AD- | usgscgu(Chd)AfaAfCfAfgcg | 857 | VPusAfscuug(Tgn)cgcuguUfuGfa | 1005 | GGUGCGUCAAACAG | 1154 | GGUGCGUCAAACAGCGA | 1154 |
| 1285246.1 | acaagsusa | | cgcascsc | | CGACAAGUU | | CAAGUU | |
| AD- | gscsguc(Ahd)AfaCfAfGfcgac | 858 | VPusAfsacuu(G2p)ucgcugUfuUfg | 1006 | GUGCGUCAAACAGC | 1155 | GUGCGUCAAACAGCGAC | 1155 |
| 1446082.1 | aagususa | | acgcsasc | | GACAAGUUC | | AAGUUC | |
| AD- | csgsuca(Ahd)AfcAfGfCfgaca | 859 | VPusGfsaacu(Tgn)gucgcuGfuUfu | 1007 | UGCGUCAAACAGCG | 1156 | UGCGUCAAACAGCGACA | 1156 |
| 1285245.2 | aguuscsa | | gacgscsa | | ACAAGUUCC | | AGUUCC | |
| AD- | csgsuca(Ahd)AfcAfGfCfgaca | 859 | VPusGfsaacu(Tgn)gucgcuGfuUfu | 1007 | UGCGUCAAACAGCG | 1156 | UGCGUCAAACAGCGACA | 1156 |
| 1285245.1 | aguuscsa | | gacgscsa | | ACAAGUUCC | | AGUUCC | |
| AD- | gsuscaa(Ahd)CfaGfCfGfacaa | 860 | VPusGfsgaac(Tgn)ugucgcUfgUfu | 1008 | GCGUCAAACAGCGA | 1157 | GCGUCAAACAGCGACAA | 1157 |
| 1446083.1 | guucscsa | | ugacsgsc | | CAAGUUCCG | | GUUCCG | |
| AD- | uscsaaa(Chd)AfgCfGfAfcaag | 861 | VPusCfsggaAfcUfUfgucgCfuGfu | 1009 | CGUCAAACAGCGAC | 1158 | CGUCAAACAGCGACAAG | 1158 |
| 1446084.1 | uuccsgsa | | uugascsg | | AAGUUCCGC | | UUCCGC | |
| AD- | cscsgcc(Chd)AfcGfUfAfaaag | 862 | VPusGfsucau(C2p)uuuuacGfuGfg | 1010 | UUCCGCCCACGUAA | 1159 | UUCCGCCCACGUAAAAG | 1159 |
| 1446085.1 | augascsa | | gcggsasa | | AAGAUGACG | | AUGACG | |
| AD- | cscsacg(Uhd)AfaAfAfGfauga | 863 | VPusAfsagcGfuCfAfucuuUfuAfc | 1011 | GCCCACGUAAAAGA | 1160 | GCCCACGUAAAAGAUGA | 1160 |
| 1446086.1 | cgcususa | | guggsgsc | | UGACGCUUG | | CGCUUG | |
| AD- | cscsacg(Uhd)AfaAfAfGfauga | 863 | VPusAfsagcg(Tgn)caucuuUfuAfc | 1012 | GCCCACGUAAAAGA | 1160 | GCCCACGUAAAAGAUGA | 1160 |
| 1285247.1 | cgcususa | | guggsgsc | | UGACGCUUG | | CGCUUG | |
| AD- | csascgu(Ahd)AfaAfGfAfuga | 864 | VPusCfsaagCfgUfCfaucuUfuUfac | 1013 | CCCACGUAAAAGAU | 1161 | CCCACGUAAAAGAUGAC | 1161 |
| 1446087.1 | cgcuusgsa | | gugsgsg | | GACGCUUGG | | GCUUGG | |
| AD- | ascsgua(Ahd)AfaGfAfUfgac | 865 | VPusCfscaag(C2p)gucaucUfuUfu | 1014 | CCACGUAAAAGAUG | 1162 | CCACGUAAAAGAUGACG | 1162 |
| 1446088.1 | gcuugsgsa | | acgusgsg | | ACGCUUGGU | | CUUGGU | |
| AD- | csgsuaa(Ahd)AfgAfUfGfacg | 866 | VPusAfsccaa(G2p)cgucauCfuUfu | 1015 | CACGUAAAAGAUGA | 1163 | CACGUAAAAGAUGACGC | 1163 |
| 1446089.1 | cuuggsusa | | uacgsusg | | CGCUUGGUG | | UUGGUG | |
| AD- | gsusaaa(Ahd)GfaUfGfAfcgc | 867 | VPusCfsaccAfaGfCfgucaUfcUfuu | 1016 | ACGUAAAAGAUGAC | 1164 | ACGUAAAAGAUGACGCU | 1164 |
| 1446090.1 | uuggusgsa | | uacsgsu | | GCUUGGUGU | | UGGUGU | |
| AD- | usasaaa(Ghd)AfuGfAfCfgcu | 868 | VPusAfscacCfaAfGfcgucAfuCfu | 1017 | CGUAAAAGAUGACG | 1165 | CGUAAAAGAUGACGCUU | 1165 |
| 1446091.1 | uggugsusa | | uuuascsg | | CUUGGUGUG | | GGUGUG | |
| AD- | asasaag(Ahd)UfgAfCfGfcuu | 869 | VPusCfsacaCfcAfAfgcguCfaUfcu | 1018 | GUAAAAGAUGACGC | 1166 | GUAAAAGAUGACGCUUG | 1166 |
| 1446092.1 | ggugusgsa | | uuusasc | | UUGGUGUGU | | GUGUGU | |
| AD- | asasaga(Uhd)GfaCfGfCfuugg | 870 | VPusAfscacAfcCfAfagcgUfcAfuc | 1019 | UAAAAGAUGACGCU | 1167 | UAAAAGAUGACGCUUGG | 1167 |
| 1446093.1 | ugugsusa | | uuususa | | UGGUGUGUC | | UGUGUC | |
| AD- | asgsaug(Ahd)CfgCfUfUfggu | 871 | VPusUfsgaca(C2p)accaagCfgUfc | 1020 | AAAGAUGACGCUUG | 1168 | AAAGAUGACGCUUGGUG | 1168 |
| 1446094.1 | gugucsasa | | aucususu | | GUGUGUCAG | | UGUCAG | |
| AD- | asusgac(Ghd)CfuUfGfGfugu | 872 | VPusGfscuga(C2p)acaccaAfgCfg | 1021 | AGAUGACGCUUGGU | 1169 | AGAUGACGCUUGGUGUG | 1169 |
| 1446095.1 | gucagscsa | | ucauscsu | | GUGUCAGCC | | UCAGCC | |
| AD- | gsascgc(Uhd)UfgGfUfGfugu | 873 | VPusCfsggcu(G2p)acacacCfaAfg | 1022 | AUGACGCUUGGUGU | 1170 | AUGACGCUUGGUGUGUC | 1170 |
| 1446096.1 | cagccsgsa | | cgucsasu | | GUCAGCCGU | | AGCCGU | |
| AD- | gscsugc(Chd)CfgGfUfUfgcu | 874 | VPusAfsagaGfaAfGfcaacCfgGfgc | 1023 | CUGCUGCCCGGUUG | 1171 | CUGCUGCCCGGUUGCUU | 1171 |
| 1446097.1 | ucucususa | | agcsasg | | CUUCUCUUU | | CUCUUU | |
| AD- | gsuscua(Ghd)CfaAfGfAfgca | 875 | VPusCfsacaCfcUfGfcucuUfgCfua | 1024 | GGGUCUAGCAAGAG | 1172 | GGGUCUAGCAAGAGCAG | 1172 |
| 1446098.1 | ggugusgsa | | gacscsc | | CAGGUGUGG | | GUGUGG | |
| AD- | gscsagg(Uhd)GfuGfGfGfuuu | 876 | VPusCfscucCfuAfAfacccAfcAfcc | 1025 | GAGCAGGUGUGGGU | 1173 | GAGCAGGUGUGGGUUUA | 1177 |
| 1446099.1 | aggagsgsa | | ugcsusc | | UUAGGAGAU | | GGAGGU | |
| AD- | csasggu(Ghd)UfgGfGfUfuua | 877 | VPusAfsccuc(C2p)uaaaccCfaCfac | 1026 | AGCAGGUGUGGGUU | 1174 | AGCAGGUGUGGGUUUAG | 1178 |
| 1446100.1 | ggaggsusa | | cugscsu | | UAGGAGAUA | | GAGGUG | |
| AD- | asgsgug(Uhd)GfgGfUfUfuag | 878 | VPusCfsaccUfcCfUfaaacCfcAfca | 1027 | GCAGGUGUGGGUUU | 1175 | GCAGGUGUGGGUUUAGG | 1179 |
| 1446101.1 | gaggusgsa | | ccusgsc | | AGGAGAUAU | | AGGUGU | |
| AD- | gsusgug(Ghd)GfuUfUfAfgga | 879 | VPusCfsacaCfcUfCfcuaaAfcCfca | 1028 | AGGUGUGGGUUUAG | 1176 | AGGUGUGGGUUUAGGAG | 1180 |
| 1446102.1 | ggugusgsa | | cacscsu | | GAGAUAUCU | | GUGUGU | |
| AD- | usgscuc(Uhd)CfaCfAfGfuacu | 880 | VPusCfsagcGfaGfUfacugUfgAfg | 1029 | | | CUUGCUCUCACAGUACU | 1181 |
| 1285244.1 | cgcusgsa | | agcasasg | | | | CGCUGA | |
| AD- | uscsuca(Chd)AfgUfAfCfucgc | 881 | VPusCfscuca(G2p)cgaguaCfuGfu | 1030 | | | GCUCUCACAGUACUCGC | 1182 |
| 1446103.1 | ugagsgsa | | gagasgsc | | | | UGAGGG | |
| AD- | uscsaca(Ghd)UfaCfUfCfgcug | 882 | VPusAfscccu(C2p)agcgagUfaCfu | 1031 | | | UCUCACAGUACUCGCUG | 1183 |
| 1446104.1 | agggsusa | | gugasgsa | | | | AGGGUG | |
| AD- | gscsuga(Ghd)GfgUfGfAfaca | 883 | VPusUfsuuuCfuUfGfuucaCfcCfu | 1032 | | | UCGCUGAGGGUGAACAA | 1184 |
| 1285235.1 | agaaasasa | | cagcsgsa | | | | GAAAAG | |
| AD- | asascaa(Ghd)AfaAfAfGfaccu | 884 | VPusUfsuauCfaGfGfucuuUfuCfu | 1033 | | | UGAACAAGAAAAGACCU | 264 |
| 1285238.1 | gauasasa | | uguuscsa | | | | GAUAAA | |
| AD- | asasgaa(Ahd)AfgAfCfCfugau | 885 | VPusUfscuuUfaUfCfagguCfuUfu | 1034 | | | ACAAGAAAAGACCUGAU | 1185 |
| 1285243.1 | aaagsasa | | ucuusgsu | | | | AAAGAU | |
| AD- | asgsaaa(Ahd)GfaCfCfUfgaua | 886 | VPusAfsucuUfuAfUfcaggUfcUfu | 1035 | | | CAAGAAAAGACCUGAUA | 1186 |
| 1285234.1 | aagasusa | | uucususg | | | | AAGAUU | |
| AD- | gsasaaa(Ghd)AfcCfUfGfauaa | 887 | VPusAfsaucUfuUfAfucagGfuCfu | 1036 | | | AAGAAAAGACCUGAUAA | 1187 |
| 1285239.1 | agaususa | | uuucsusu | | | | AGAUUA | |
| AD- | asasaag(Ahd)CfcUfGfAfuaaa | 888 | VPusUfsaauCfuUfUfaucaGfgUfc | 1037 | | | AGAAAAGACCUGAUAAA | 1188 |
| 1285232.1 | gauusasa | | uuuuscsu | | | | GAUUAA | |
| AD- | asasaga(Chd)CfuGfAfUfaaag | 889 | VPusUfsuaaUfcUfUfuaucAfgGfu | 1038 | | | GAAAAGACCUGAUAAAG | 1189 |
| 1285231.1 | auuasasa | | cuuususc | | | | AUUAAC | |
| AD- | asasgac(Chd)UfgAfUfAfaaga | 890 | VPusGfsuuaAfuCfUfuuauCfaGfg | 1039 | | | AAAAGACCUGAUAAAGA | 1190 |
| 1285240.1 | uuaascsa | | ucuususu | | | | UUAACC | |
| AD- | gsasccu(Ghd)AfuAfAfAfgau | 891 | VPusUfsgguUfaAfUfcuuuAfuCfa | 1040 | | | AAGACCUGAUAAAGAUU | 1191 |
| 1285241.1 | uaaccsasa | | ggucsusu | | | | AACCAG | |
| AD- | ascscug(Ahd)UfaAfAfGfauu | 892 | VPusCfsuggUfuAfAfucuuUfaUfc | 1041 | | | AGACCUGAUAAAGAUUA | 1192 |
| 1285242.1 | aaccasgsa | | agguscsu | | | | ACCAGA | |
| AD- | asasaga(Uhd)UfaAfCfCfagaa | 893 | VPusUfsuuuCfuUfCfugguUfaAfu | 1042 | | | AUAAAGAUUAACCAGAA | 1193 |
| 1285233.1 | gaaasasa | | cuuusasu | | | | GAAAAC | |
| AD- | asusuaa(Chd)CfaGfAfAfgaaa | 894 | VPusCfsuugUfuUfUfcuucUfgGfu | 1043 | | | AGAUUAACCAGAAGAAA | 1194 |
| 1285237.1 | acaasgsa | | uaauscsu | | | | ACAAGG | |
| AD- | asascca(Ghd)AfaGfAfAfaaca | 895 | VPusCfsuccUfuGfUfuuucUfuCfu | 1044 | | | UUAACCAGAAGAAAACA | 1195 |
| 1285236.1 | aggasgsa | | gguusasa | | | | AGGAGG | |
| AD- | gsgsagg(Ghd)AfaAfCfAfacc | 896 | VPusGfsgcug(C2p)gguuguUfuCfc | 1045 | | | AAGGAGGGAAACAACCG | 1196 |
| 1446105.1 | gcagcscsa | | cuccsusu | | | | CAGCCU | |
| AD- | gsasggg(Ahd)AfaCfAfAfccg | 897 | VPusAfsggcu(G2p)cgguugUfuUf | 1046 | | | AGGAGGGAAACAACCGC | 1197 |
| 1446106.1 | cagccsusa | | cccucscsu | | | | AGCCUG | |
| AD- | csasgcc(Uhd)GfuAfGfCfaagc | 898 | VPusCfscaga(G2p)cuugcuAfcAfg | 1047 | | | CGCAGCCUGUAGCAAGC | 1198 |
| 1446107.1 | ucugsgsa | | gcugscsg | | | | UCUGGA | |
| AD- | csuscug(Ghd)AfaCfUfCfagga | 899 | VPusGfscgac(Tgn)ccugagUfuCfc | 1048 | | | AGCUCUGGAACUCAGGA | 1199 |
| 1446108.1 | gucgscsa | | agagscsu | | | | GUCGCG | |
| AD- | uscsucc(Uhd)CfaGfAfGfcucg | 900 | VPusUfsgcgu(C2p)gagcucUfgAfg | 1049 | | | GCUCUCCUCAGAGCUCG | 1200 |
| 1446109.1 | acgcsasa | | gagasgsc | | | | ACGCAU | |
| AD- | uscscuc(Ahd)GfaGfCfUfcgac | 901 | VPusAfsaugc(G2p)ucgagcUfcUfg | 1050 | | | UCUCCUCAGAGCUCGAC | 1201 |
| 1446110.1 | gcaususa | | aggasgsa | | | | GCAUUU | |
| AD- | ascsuuu(Chd)CfcUfCfUfcauu | 902 | VPusAfsgagAfaAfUfgagaGfgGfa | 1051 | | | UUACUUUCCCUCUCAUU | 1202 |
| 1446111.1 | ucucsusa | | aagusasa | | | | UCUCUG | |
| AD- | csusuuc(Chd)CfuCfUfCfauuu | 903 | VPusCfsagaGfaAfAfugagAfgGfg | 1052 | | | UACUUUCCCUCUCAUUU | 1203 |
| 1446112.1 | cucusgsa | | aaagsusa | | | | CUCUGA | |
| AD- | ususucc(Chd)UfcUfCfAfuuu | 904 | VPusUfscaga(G2p)aaaugaGfaGfg | 1053 | | | ACUUUCCCUCUCAUUUC | 1204 |
| 1446113.1 | cucugsasa | | gaaasgsu | | | | UCUGAC | |
| AD- | uscsccu(Chd)UfcAfUfUfucuc | 905 | VPusGfsguca(G2p)agaaauGfaGfa | 1054 | | | UUUCCCUCUCAUUUCUC | 1205 |
| 1446114.1 | ugacscsa | | gggasasa | | | | UGACCG | |
| AD- | cscscuc(Uhd)CfaUfUfUfcucu | 906 | VPusCfsgguc(Agn)gagaaaUfgAfg | 1055 | | | UUCCCUCUCAUUUCUCU | 208 |
| 1446115.1 | gaccsgsa | | agggsasa | | | | GACCGA | |
| AD- | cscsucu(Chd)AfuUfUfCfucu | 907 | VPusUfscggu(C2p)agagaaAfuGfa | 1056 | | | UCCCUCUCAUUUCUCUG | 1206 |
| 1446116.1 | gaccgsasa | | gaggsgsa | | | | ACCGAA | |
| AD- | uscsuca(Uhd)UfuCfUfCfugac | 908 | VPusCfsuucg(G2p)ucagagAfaAfu | 1057 | | | CCUCUCAUUUCUCUGAC | 1207 |
| 1446117.1 | cgaasgsa | | gagasgsg | | | | CGAAGC | |
| AD- | csuscau(Uhd)UfcUfCfUfgacc | 909 | VPusGfscuuc(G2p)gucagaGfaAfa | 1058 | | | CUCUCAUUUCUCUGACC | 1208 |
| 1446118.1 | gaagscsa | | ugagsasg | | | | GAAGCU | |
| AD- | uscsauu(Uhd)CfuCfUfGfaccg | 910 | VPusAfsgcuu(C2p)ggucagAfgAfa | 1059 | | | UCUCAUUUCUCUGACCG | 206 |
| 1446119.1 | aagcsusa | | augasgsa | | | | AAGCUG | |
| AD- | csuscug(Ahd)CfcGfAfAfgcu | 911 | VPusAfscacc(C2p)agcuucGfgUfc | 1060 | | | UUCUCUGACCGAAGCUG | 203 |
| 1446120.1 | gggugsusa | | agagsasa | | | | GGUGUC | |
| AD- | gsgsugu(Chd)GfgGfCfUfuuc | 912 | VPusAfsgagg(C2p)gaaagcCfcGfa | 1061 | | | UGGGUGUCGGGCUUUCG | 1209 |
| 1446121.1 | gccucsusa | | caccscsa | | | | CCUCUA | |
| AD- | uscsggg(Chd)UfuUfCfGfccu | 913 | VPusCfsgcuAfgAfGfgcgaAfaGfc | 1062 | | | UGUCGGGCUUUCGCCUC | 1210 |
| 1446122.1 | cuagcsgsa | | ccgascsa | | | | UAGCGA | |
| AD- | csusuuc(Ghd)CfcUfCfUfagcg | 914 | VPusCfscagu(C2p)gcuagaGfgCfg | 1063 | | | GGCUUUCGCCUCUAGCG | 1211 |
| 1446123.1 | acugsgsa | | aaagscsc | | | | ACUGGU | |
| AD- | ususcgc(Chd)UfcUfAfGfcgac | 915 | VPusCfsaccAfgUfCfgcuaGfaGfgc | 1064 | | | CUUUCGCCUCUAGCGAC | 1212 |
| 1446124.1 | uggusgsa | | gaasasg | | | | UGGUGG | |
| AD- | uscsgcc(Uhd)CfuAfGfCfgacu | 916 | VPusCfscacCfaGfUfcgcuAfgAfg | 1065 | | | UUUCGCCUCUAGCGACU | 201 |
| 1446125.1 | ggugsgsa | | gcgasasa | | | | GGUGGA | |
| AD- | csgsccu(Chd)UfaGfCfGfacug | 917 | VPusUfsccac(C2p)agucgcUfaGfa | 1066 | | | UUCGCCUCUAGCGACUG | 1213 |
| 1446126.1 | guggsasa | | ggcgsasa | | | | GUGGAA | |
| AD- | gscscuc(Uhd)AfgCfGfAfcug | 918 | VPusUfsucca(C2p)cagucgCfuAfg | 1067 | | | UCGCCUCUAGCGACUGG | 1214 |
| 1446127.1 | guggasasa | | aggcsgsa | | | | UGGAAU | |
| AD- | csuscua(Ghd)CfgAfCfUfggu | 919 | VPusAfsauuc(C2p)accaguCfgCfu | 1068 | | | GCCUCUAGCGACUGGUG | 1215 |
| 1446128.1 | ggaaususa | | agagsgsc | | | | GAAUUG | |
| AD- | uscsuag(Chd)GfaCfUfGfgug | 920 | VPusCfsaauu(C2p)caccagUfcGfc | 1069 | | | CCUCUAGCGACUGGUGG | 1216 |
| 1446129.1 | gaauusgsa | | uagasgsg | | | | AAUUGC | |
| AD- | gsascug(Ghd)UfgGfAfAfuug | 921 | VPusUfsgcag(G2p)caauucCfaCfc | 1070 | | | GCGACUGGUGGAAUUGC | 1217 |
| 1446130.1 | ccugcsasa | | agucsgsc | | | | CUGCAU | |
| AD- | ascsugg(Uhd)GfgAfAfUfugc | 922 | VPusAfsugca(G2p)gcaauuCfcAfc | 1071 | | | CGACUGGUGGAAUUGCC | 1218 |
| 1446131.1 | cugcasusa | | caguscsg | | | | UGCAUC | |
| AD- | usgsgug(Ghd)AfaUfUfGfccu | 923 | VPusGfsgaug(C2p)aggcaaUfuCfc | 1072 | | | ACUGGUGGAAUUGCCUG | 1219 |
| 1446132.1 | gcaucscsa | | accasgsu | | | | CAUCCG | |
| AD- | uscsugg(Chd)CfuCfUfUfccu | 924 | VPusAfsaagCfaAfGfgaagAfgGfc | 1073 | | | GAUCUGGCCUCUUCCUU | 1220 |
| 1446134.1 | ugcuususa | | cagasusc | | | | GCUUUC | |
| AD- | csusggc(Chd)UfcUfUfCfcuu | 925 | VPusGfsaaag(C2p)aaggaaGfaGfg | 1074 | | | AUCUGGCCUCUUCCUUG | 1221 |
| 1446135.1 | gcuuuscsa | | ccagsasu | | | | CUUUCC | |
| AD- | usgsgcc(Uhd)CfuUfCfCfuug | 926 | VPusGfsgaaa(G2p)caaggaAfgAfg | 1075 | | | UCUGGCCUCUUCCUUGC | 1222 |
| 1446136.1 | cuuucscsa | | gccasgsa | | | | UUUCCC | |
| AD- | gsgsccu(Chd)UfuCfCfUfugc | 927 | VPusGfsggaAfaGfCfaaggAfaGfa | 1076 | | | CUGGCCUCUUCCUUGCU | 1223 |
| 1446137.1 | uuuccscsa | | ggccsasg | | | | UUCCCG | |
| AD- | gscscuc(Uhd)UfcCfUfUfgcu | 928 | VPusCfsgggAfaAfGfcaagGfaAfg | 1077 | | | UGGCCUCUUCCUUGCUU | 1224 |
| 1446138.1 | uucccsgsa | | aggcscsa | | | | UCCCGC | |
| AD- | ususccu(Uhd)GfcUfUfUfccc | 929 | VPusGfsaggg(C2p)gggaaaGfcAfa | 1078 | | | UCUUCCUUGCUUUCCCG | 1225 |
| 1446139.1 | gcccuscsa | | ggaasgsa | | | | CCCUCA | |
| AD- | uscscuu(Ghd)CfuUfUfCfccgc | 930 | VPusUfsgagg(G2p)cgggaaAfgCfa | 1079 | | | CUUCCUUGCUUUCCCGC | 1226 |
| 1446140.1 | ccucsasa | | aggasasg | | | | CCUCAG | |
| AD- | cscsuug(Chd)UfuUfCfCfcgcc | 931 | VPusCfsugag(G2p)gcgggaAfaGfc | 1080 | | | UUCCUUGCUUUCCCGCC | 1227 |
| 1446141.1 | cucasgsa | | aaggsasa | | | | CUCAGU | |
| AD- | csusugc(Uhd)UfuCfCfCfgccc | 932 | VPusAfscuga(G2p)ggcgggAfaAfg | 1081 | | | UCCUUGCUUUCCCGCCC | 1228 |
| 1446142.1 | ucagsusa | | caagsgsa | | | | UCAGUA | |
| AD- | asgsuac(Chd)CfgAfGfCfuguc | 933 | VPusAfsagga(G2p)acagcuCfgGfg | 1082 | | | UCAGUACCCGAGCUGUC | 1229 |
| 1446143.1 | uccususa | | uacusgsa | | | | UCCUUC | |
| AD- | usasccc(Ghd)AfgCfUfGfucuc | 934 | VPusGfsgaag(G2p)agacagCfuCfg | 1083 | | | AGUACCCGAGCUGUCUC | 1230 |
| 1446144.1 | cuucscsa | | gguascsu | | | | CUUCCC | |
| AD- | gsasgga(Ghd)AfuCfAfUfgcg | 935 | VPusUfscauc(C2p)cgcaugAfuCfu | 1084 | | | GCGAGGAGAUCAUGCGG | 1231 |
| 1446145.1 | ggaugsasa | | ccucsgsc | | | | GAUGAG | |
| AD- | asgsacg(Chd)CfuGfCfAfcaau | 936 | VPusCfsugaAfaUfUfgugcAfgGfc | 1085 | | | GGAGACGCCUGCACAAU | 1232 |
| 1446146.1 | uucasgsa | | gucuscsc | | | | UUCAGC | |
| AD- | gsascgc(Chd)UfgCfAfCfaauu | 937 | VPusGfscugAfaAfUfugugCfaGfg | 1086 | | | GAGACGCCUGCACAAUU | 1233 |
| 1446147.1 | ucagscsa | | cgucsusc | | | | UCAGCC | |
| AD- | csgsccu(Ghd)CfaCfAfAfuuuc | 938 | VPusGfsggcu(G2p)aaauugUfgCfa | 1087 | | | GACGCCUGCACAAUUUC | 1234 |
| 1446148.1 | agccscsa | | ggcgsusc | | | | AGCCCA | |
| AD- | cscsugc(Ahd)CfaAfUfUfucag | 939 | VPusUfsuggg(C2p)ugaaauUfgUfg | 1088 | | | CGCCUGCACAAUUUCAG | 1235 |
| 1446149.1 | cccasasa | | caggscsg | | | | CCCAAG | |
| AD- | csusgca(Chd)AfaUfUfUfcagc | 940 | VPusCfsuugg(G2p)cugaaaUfuGfu | 1089 | | | GCCUGCACAAUUUCAGC | 1236 |
| 1446150.1 | ccaasgsa | | gcagsgsc | | | | CCAAGC | |
| AD- | usgscac(Ahd)AfuUfUfCfagcc | 941 | VPusGfscuug(G2p)gcugaaAfuUfg | 1090 | | | CCUGCACAAUUUCAGCC | 1237 |
| 1446151.1 | caagscsa | | ugcasgsg | | | | CAAGCU | |
| AD- | csasauu(Uhd)CfaGfCfCfcaag | 942 | VPusAfsgaag(C2p)uugggcUfgAfa | 1091 | | | CACAAUUUCAGCCCAAG | 1238 |
| 1446152.1 | cuucsusa | | auugsusg | | | | CUUCUA | |
| AD- | asasuuu(Chd)AfgCfCfCfaagc | 943 | VPusUfsagaa(G2p)cuugggCfuGfa | 1092 | | | ACAAUUUCAGCCCAAGC | 1239 |
| 1446153.1 | uucusasa | | aauusgsu | | | | UUCUAG | |
| AD- | csasgcc(Chd)AfaGfCfUfucua | 944 | VPusCfsucuc(Tgn)agaagcUfuGfg | 1093 | | | UUCAGCCCAAGCUUCUA | 1240 |
| 1446154.1 | gagasgsa | | gcugsasa | | | | GAGAGU | |
| AD- | asgsccc(Ahd)AfgCfUfUfcuag | 945 | VPusAfscucu(C2p)uagaagCfuUfg | 1094 | | | UCAGCCCAAGCUUCUAG | 1241 |
| 1446155.1 | agagsusa | | ggcusgsa | | | | AGAGUG | |
| AD- | gscscca(Ahd)GfcUfUfCfuaga | 946 | VPusCfsacuc(Tgn)cuagaaGfcUfu | 1095 | | | CAGCCCAAGCUUCUAGA | 1242 |
| 1446156.1 | gagusgsa | | gggcsusg | | | | GAGUGG | |
| AD- | cscscaa(Ghd)CfuUfCfUfagag | 947 | VPusCfscacUfcUfCfuagaAfgCfuu | 1096 | | | AGCCCAAGCUUCUAGAG | 1243 |
| 1446157.1 | agugsgsa | | gggscsu | | | | AGUGGU | |
| AD- | cscsaag(Chd)UfuCfUfAfgaga | 948 | VPusAfsccac(Tgn)cucuagAfaGfc | 1097 | | | GCCCAAGCUUCUAGAGA | 1244 |
| 1446158.1 | guggsusa | | uuggsgsc | | | | GUGGUG | |
| AD- | csasagc(Uhd)UfcUfAfGfagag | 949 | VPusCfsaccAfcUfCfucuaGfaAfgc | 1098 | | | CCCAAGCUUCUAGAGAG | 1245 |
| 1446159.1 | uggusgsa | | uugsgsg | | | | UGGUGA | |
| AD- | asasgcu(Uhd)CfuAfGfAfgag | 950 | VPusUfscacc(Agn)cucucuAfgAfa | 1099 | | | CCAAGCUUCUAGAGAGU | 1246 |
| 1446160.1 | uggugsasa | | gcuusgsg | | | | GGUGAU | |
| AD- | asgscuu(Chd)UfaGfAfGfagu | 951 | VPusAfsucac(C2p)acucucUfaGfa | 1100 | | | CAAGCUUCUAGAGAGUG | 1247 |
| 1446161.1 | ggugasusa | | agcususg | | | | GUGAUG | |
| AD- | gscsuuc(Uhd)AfgAfGfAfgug | 952 | VPusCfsauca(C2p)cacucuCfuAfg | 1101 | | | AAGCUUCUAGAGAGUGG | 1248 |
| 1446162.1 | gugausgsa | | aagcsusu | | | | UGAUGA | |
| AD- | ususcua(Ghd)AfgAfGfUfggu | 953 | VPusGfsucau(C2p)accacuCfuCfu | 1102 | | | GCUUCUAGAGAGUGGUG | 1249 |
| 1446163.1 | gaugascsa | | agaasgsc | | | | AUGACU | |
| AD- | usasgag(Ahd)GfuGfGfUfgau | 954 | VPusCfsaagu(C2p)aucaccAfcUfc | 1103 | | | UCUAGAGAGUGGUGAUG | 1250 |
| 1446164.1 | gacuusgsa | | ucuasgsa | | | | ACUUGC | |
| AD- | asgsaga(Ghd)UfgGfUfGfaug | 955 | VPusGfscaag(Tgn)caucacCfaCfuc | 1104 | | | CUAGAGAGUGGUGAUGA | 1251 |
| 1446165.1 | acuugscsa | | ucusasg | | | | CUUGCA | |
| AD- | gsasgag(Uhd)GfgUfGfAfuga | 956 | VPusUfsgcaa(G2p)ucaucaCfcAfc | 1105 | | | UAGAGAGUGGUGAUGAC | 1252 |
| 1446166.1 | cuugcsasa | | ucucsusa | | | | UUGCAU | |
| AD- | asgsugg(Uhd)GfaUfGfAfcuu | 957 | VPusAfsuaug(C2p)aagucaUfcAfc | 1106 | | | AGAGUGGUGAUGACUUG | 1253 |
| 1446167.1 | gcauasusa | | cacuscsu | | | | CAUAUG | |
| AD- | gsgsuga(Uhd)GfaCfUfUfgca | 958 | VPusCfsucaUfaUfGfcaagUfcAfuc | 1107 | | | GUGGUGAUGACUUGCAU | 1254 |
| 1446168.1 | uaugasgsa | | accsasc | | | | AUGAGG | |
| AD- | gsusgau(Ghd)AfcUfUfGfcau | 959 | VPusCfscucAfuAfUfgcaaGfuCfa | 1108 | | | UGGUGAUGACUUGCAUA | 1255 |
| 1446169.1 | augagsgsa | | ucacscsa | | | | UGAGGG | |
| AD- | usgsaug(Ahd)CfuUfGfCfaua | 960 | VPusCfsccuCfaUfAfugcaAfgUfca | 1109 | | | GGUGAUGACUUGCAUAU | 1256 |
| 1446170.1 | ugaggsgsa | | ucascsc | | | | GAGGGC | |
| AD- | asgsggc(Ahd)GfcAfAfUfgca | 961 | VPusCfscgaCfuUfGfcauuGfcUfg | 1110 | | | UGAGGGCAGCAAUGCAA | 1257 |
| 1446171.1 | agucgsgsa | | cccuscsa | | | | GUCGGU | |
| AD- | gsgsgca(Ghd)CfaAfUfGfcaag | 962 | VPusAfsccgAfcUfUfgcauUfgCfu | 1111 | | | GAGGGCAGCAAUGCAAG | 1258 |
| 1446172.1 | ucggsusa | | gcccsusc | | | | UCGGUG | |
| AD- | gsgscag(Chd)AfaUfGfCfaagu | 963 | VPusCfsaccGfaCfUfugcaUfuGfcu | 1112 | | | AGGGCAGCAAUGCAAGU | 1259 |
| 1446173.1 | cggusgsa | | gccscsu | | | | CGGUGU | |
| AD- | gscsagc(Ahd)AfuGfCfAfagu | 964 | VPusAfscacCfgAfCfuugcAfuUfg | 1113 | | | GGGCAGCAAUGCAAGUC | 1260 |
| 1446174.1 | cggugsusa | | cugcscsc | | | | GGUGUG | |
| AD- | csasgca(Ahd)UfgCfAfAfguc | 965 | VPusCfsacaCfcGfAfcuugCfaUfug | 1114 | | | GGCAGCAAUGCAAGUCG | 1261 |
| 1446175.1 | ggugusgsa | | cugscsc | | | | GUGUGC | |
| AD- | csasaug(Chd)AfaGfUfCfggu | 966 | VPusGfsagca(C2p)accgacUfuGfc | 1115 | | | AGCAAUGCAAGUCGGUG | 1262 |
| 1446176.1 | gugcuscsa | | auugscsu | | | | UGCUCC | |
| AD- | csusgug(Ghd)GfaCfAfUfgac | 967 | VPusAfsacca(G2p)gucaugUfcCfc | 1116 | | | UUCUGUGGGACAUGACC | 1263 |
| 1446177.1 | cuggususa | | acagsasa | | | | UGGUUG | |
| AD- | usgsugg(Ghd)AfcAfUfGfacc | 968 | VPusCfsaacCfaGfGfucauGfuCfcc | 1117 | | | UCUGUGGGACAUGACCU | 1264 |
| 1446178.1 | ugguusgsa | | acasgsa | | | | GGUUGC | |
| AD- | gsusggg(Ahd)CfaUfGfAfccu | 969 | VPusGfscaac(C2p)aggucaUfgUfc | 1118 | | | CUGUGGGACAUGACCUG | 1265 |
| 1446179.1 | gguugscsa | | ccacsasg | | | | GUUGCU | |
| AD- | usgsgga(Chd)AfuGfAfCfcug | 970 | VPusAfsgcaAfcCfAfggucAfuGfu | 1119 | | | UGUGGGACAUGACCUGG | 1266 |
| 1446180.1 | guugcsusa | | cccascsa | | | | UUGCUU | |
| AD- | gsascau(Ghd)AfcCfUfGfguu | 971 | VPusUfsgaag(C2p)aaccagGfuCfa | 1120 | | | GGGACAUGACCUGGUUG | 1267 |
| 1446181.1 | gcuucsasa | | ugucscsc | | | | CUUCAC | |
| AD- | ascsaug(Ahd)CfcUfGfGfuug | 972 | VPusGfsugaa(G2p)caaccaGfgUfc | 1121 | | | GGACAUGACCUGGUUGC | 1268 |
| 1446182.1 | cuucascsa | | auguscsc | | | | UUCACA | |
| AD- | usgsacc(Uhd)GfgUfUfGfcuu | 973 | VPusGfscugu(G2p)aagcaaCfcAfg | 1122 | | | CAUGACCUGGUUGCUUC | 1269 |
| 1446183.1 | cacagscsa | | gucasusg | | | | ACAGCU | |
| AD- | gsasccu(Ghd)GfuUfGfCfuuc | 974 | VPusAfsgcug(Tgn)gaagcaAfcCfa | 1123 | | | AUGACCUGGUUGCUUCA | 1270 |
| 1446184.1 | acagcsusa | | ggucsasu | | | | CAGCUC | |
| AD- | ascscug(Ghd)UfuGfCfUfucac | 975 | VPusGfsagcu(G2p)ugaagcAfaCfc | 1124 | | | UGACCUGGUUGCUUCAC | 1271 |
| 1446185.1 | agcuscsa | | agguscsa | | | | AGCUCC | |
| AD- | cscsugg(Uhd)UfgCfUfUfcaca | 976 | VPusGfsgagc(Tgn)gugaagCfaAfc | 1125 | | | GACCUGGUUGCUUCACA | 1272 |
| 1446186.1 | gcucscsa | | caggsusc | | | | GCUCCG | |
| AD- | csusggu(Uhd)GfcUfUfCfaca | 977 | VPusCfsggag(C2p)ugugaaGfcAfa | 1126 | | | ACCUGGUUGCUUCACAG | 1273 |
| 1446187.1 | gcuccsgsa | | ccagsgsu | | | | CUCCGA | |
| AD- | usgsguu(Ghd)CfuUfCfAfcag | 978 | VPusUfscgga(G2p)cugugaAfgCfa | 1127 | | | CCUGGUUGCUUCACAGC | 1274 |
| 1446188.1 | cuccgsasa | | accasgsg | | | | UCCGAG | |
| AD- | gsgsuug(Chd)UfuCfAfCfagc | 979 | VPusCfsucgGfaGfCfugugAfaGfc | 1128 | | | CUGGUUGCUUCACAGCU | 1275 |
| 1446189.1 | uccgasgsa | | aaccsasg | | | | CCGAGA | |
| AD- | gsusugc(Uhd)UfcAfCfAfgcu | 980 | VPusUfscucg(G2p)agcuguGfaAfg | 1129 | | | UGGUUGCUUCACAGCUC | 1276 |
| 1446190.1 | ccgagsasa | | caacscsa | | | | CGAGAU | |
| AD- | ususgcu(Uhd)CfaCfAfGfcucc | 981 | VPusAfsucuc(G2p)gagcugUfgAfa | 1130 | | | GGUUGCUUCACAGCUCC | 1277 |
| 1446191.1 | gagasusa | | gcaascsc | | | | GAGAUG | |
| AD- | csasgcu(Chd)CfgAfGfAfugac | 982 | VPusUfscugu(G2p)ucaucuCfgGfa | 1131 | | | CACAGCUCCGAGAUGAC | 1278 |
| 1446192.1 | acagsasa | | gcugsusg | | | | ACAGAC | |
| AD- | gscsucc(Ghd)AfgAfUfGfacac | 983 | VPusAfsgucu(G2p)ugucauCfuCfg | 1132 | | | CAGCUCCGAGAUGACAC | 1279 |
| 1446193.1 | agacsusa | | gagcsusg | | | | AGACUU | |
| AD- | csusccg(Ahd)GfaUfGfAfcaca | 984 | VPusAfsaguc(Tgn)gugucaUfcUfc | 1133 | | | AGCUCCGAGAUGACACA | 1280 |
| 1446194.1 | gacususa | | ggagscsu | | | | GACUUG | |
| AD- | uscscga(Ghd)AfuGfAfCfacag | 985 | VPusCfsaagu(C2p)ugugucAfuCfu | 1134 | | | GCUCCGAGAUGACACAG | 1281 |
| 1446195.1 | acuusgsa | | cggasgsc | | | | ACUUGC | |
| AD- | cscsgag(Ahd)UfgAfCfAfcaga | 986 | VPusGfscaag(Tgn)cuguguCfaUfc | 1135 | | | CUCCGAGAUGACACAGA | 1282 |
| 1446196.1 | cuugscsa | | ucggsasg | | | | CUUGCU | |
| AD- | csgsaga(Uhd)GfaCfAfCfagac | 987 | VPusAfsgcaa(G2p)ucugugUfcAfu | 1136 | | | UCCGAGAUGACACAGAC | 1283 |
| 1446197.1 | uugcsusa | | cucgsgsa | | | | UUGCUU | |
| AD- | gsasgau(Ghd)AfcAfCfAfgac | 988 | VPusAfsagca(Agn)gucuguGfuCfa | 1137 | | | CCGAGAUGACACAGACU | 1284 |
| 1446198.1 | uugcususa | | ucucsgsg | | | | UGCUUA | |
| AD- | gsasuga(Chd)AfcAfGfAfcuu | 989 | VPusUfsuaag(C2p)aagucuGfuGfu | 1138 | | | GAGAUGACACAGACUUG | 1285 |
| 1446199.1 | gcuuasasa | | caucsusc | | | | CUUAAA | |
| AD- | asusgac(Ahd)CfaGfAfCfuugc | 990 | VPusUfsuuaa(G2p)caagucUfgUfg | 1139 | | | AGAUGACACAGACUUGC | 1286 |
| 1446200.1 | uuaasasa | | ucauscsu | | | | UUAAAG | |
| AD- | usgsaca(Chd)AfgAfCfUfugc | 991 | VPusCfsuuuAfaGfCfaaguCfuGfu | 1140 | | | GAUGACACAGACUUGCU | 1287 |
| 1446201.1 | uuaaasgsa | | gucasusc | | | | UAAAGG | |
| AD- | gsascac(Ahd)GfaCfUfUfgcuu | 992 | VPusCfscuuUfaAfGfcaagUfcUfg | 1141 | | | AUGACACAGACUUGCUU | 1288 |
| 1446202.1 | aaagsgsa | | ugucsasu | | | | AAAGGA | |
| AD- | ascsaca(Ghd)AfcUfUfGfcuua | 993 | VPusUfsccuUfuAfAfgcaaGfuCfu | 1142 | | | UGACACAGACUUGCUUA | 1289 |
| 1446203.1 | aaggsasa | | guguscsa | | | | AAGGAA | |
| AD- | csasgac(Uhd)UfgCfUfUfaaag | 994 | VPusAfscuuc(C2p)uuuaagCfaAfg | 1143 | | | CACAGACUUGCUUAAAG | 1290 |
| 1446204.1 | gaagsusa | | ucugsusg | | | | GAAGUG | |
| AD- | asgsacu(Uhd)GfcUfUfAfaag | 995 | VPusCfsacuu(C2p)cuuuaaGfcAfa | 1144 | | | ACAGACUUGCUUAAAGG | 1291 |
| 1446205.1 | gaagusgsa | | gucusgsu | | | | AAGUGA | |

TABLE 7
Single Dose Screen of dsRNA Agents Targeting the Sense Strand of Either
Exon 1A or the 3′-side of the Intronic Repeat Between Exons 1A and 1B

| | 10 nM % | | 1 nM % | | 0.1 nM % | |
|---|---|---|---|---|---|---|
| | Message | | Message | | Message | |
| Sample Name | Remaining | STDEV | Remaining | STDEV | Remaining | STDEV |
| AD-1285232.1 | 9 | 1 | 11 | 1 | 17 | 3 |
| AD-1446196.1 | 9 | 1 | 10 | 1 | 16 | 3 |
| AD-1446111.1 | 9 | 2 | 10 | 2 | 16 | 1 |
| AD-1446182.1 | 10 | 1 | 12 | 4 | 24 | 1 |
| AD-1446084.1 | 10 | 2 | 10 | 1 | 19 | 4 |
| AD-1285231.1 | 10 | 2 | 12 | 1 | 15 | 1 |
| AD-1446185.1 | 10 | 2 | 15 | 1 | 22 | 3 |
| AD-1446200.1 | 10 | 1 | 15 | 3 | 18 | 2 |
| AD-1446083.1 | 11 | 1 | 18 | 6 | 24 | 2 |
| AD-1285233.1 | 11 | 3 | 15 | 3 | 21 | 3 |
| AD-1446202.1 | 11 | 2 | 14 | 2 | 18 | 4 |
| AD-1446152.1 | 12 | 1 | 14 | 2 | 22 | 4 |
| AD-1446188.1 | 12 | 1 | 13 | 1 | 18 | 1 |
| AD-1285241.1 | 12 | 2 | 12 | 4 | 20 | 5 |
| AD-1446113.1 | 12 | 2 | 21 | 4 | 29 | 8 |
| AD-1446150.1 | 12 | 2 | 20 | 1 | 30 | 3 |
| AD-1446090.1 | 13 | 2 | 17 | 4 | 24 | 3 |
| AD-1446197.1 | 13 | 3 | 11 | 2 | 19 | 2 |
| AD-1446194.1 | 14 | 3 | 17 | 1 | 27 | 2 |
| AD-1446184.1 | 14 | 1 | 17 | 4 | 24 | 3 |
| AD-1446199.1 | 14 | 2 | 20 | 4 | 23 | 6 |
| AD-1285237.1 | 16 | 5 | 17 | 1 | 23 | 3 |
| AD-1285242.1 | 16 | 2 | 16 | 2 | 20 | 5 |
| AD-1285234.1 | 17 | 3 | 18 | 2 | 23 | 4 |
| AD-1446087.1 | 17 | 1 | 24 | 3 | 32 | 6 |
| AD-1446112.1 | 17 | 3 | 15 | 7 | 20 | 7 |
| AD-1446103.1 | 17 | 2 | 27 | 7 | 40 | 5 |
| AD-1285238.1 | 17 | 3 | 18 | 3 | 23 | 6 |
| AD-1446156.1 | 17 | 3 | 21 | 2 | 33 | 4 |
| AD-1446161.1 | 17 | 1 | 15 | 5 | 25 | 4 |
| AD-1446114.1 | 18 | 5 | 22 | 3 | 37 | 8 |
| AD-1446154.1 | 18 | 2 | 21 | 4 | 32 | 5 |
| AD-1285239.1 | 18 | 7 | 16 | 2 | 21 | 1 |
| AD-1285236.1 | 18 | 4 | 25 | 2 | 25 | 7 |
| AD-1446166.1 | 18 | 1 | 17 | 2 | 37 | 5 |
| AD-1446180.1 | 18 | 5 | 25 | 4 | 36 | 9 |
| AD-1446192.1 | 18 | 2 | 19 | 2 | 29 | 4 |
| AD-1446095.1 | 18 | 4 | 20 | 1 | 31 | 1 |
| AD-1285243.1 | 18 | 4 | 18 | 4 | 24 | 2 |
| AD-1446167.1 | 18 | 2 | 22 | 4 | 40 | 7 |
| AD-1285244.1 | 19 | 3 | 19 | 3 | 31 | 3 |
| AD-1446158.1 | 19 | 3 | 20 | 2 | 30 | 1 |
| AD-1446201.1 | 19 | 4 | 23 | 0 | 24 | 2 |
| AD-1446168.1 | 19 | 3 | 23 | 3 | 44 | 9 |
| AD-1446092.1 | 20 | 5 | 20 | 3 | 27 | 4 |
| AD-1446157.1 | 20 | 3 | 32 | 3 | 41 | 9 |
| AD-1446170.1 | 21 | 3 | 25 | 2 | 52 | 3 |
| AD-1446149.1 | 22 | 2 | 27 | 6 | 37 | 4 |
| AD-1446091.1 | 22 | 5 | 26 | 6 | 41 | 4 |
| AD-1446198.1 | 22 | 3 | 23 | 2 | 41 | 7 |
| AD-1446117.1 | 23 | 4 | 26 | 3 | 26 | 4 |
| AD-1446073.1 | 23 | 3 | 27 | 2 | 37 | 3 |
| AD-1446148.1 | 23 | 3 | 33 | 2 | 42 | 5 |
| AD-1446088.1 | 23 | 3 | 21 | 5 | 33 | 4 |
| AD-1446160.1 | 23 | 4 | 23 | 3 | 30 | 6 |
| AD-1446183.1 | 23 | 6 | 24 | 1 | 40 | 7 |
| AD-1446153.1 | 24 | 4 | 23 | 1 | 35 | 3 |
| AD-1446147.1 | 24 | 2 | 36 | 6 | 41 | 3 |
| AD-1285240.1 | 24 | 3 | 22 | 1 | 25 | 3 |
| AD-1446089.1 | 24 | 1 | 23 | 5 | 37 | 6 |
| AD-1446205.1 | 24 | 10 | 26 | 5 | 31 | 3 |
| AD-1446195.1 | 25 | 3 | 28 | 5 | 45 | 4 |
| AD-1446162.1 | 25 | 1 | 26 | 2 | 33 | 6 |
| AD-1285246.2 | 25 | 8 | 26 | 4 | 34 | 6 |
| AD-1446177.1 | 25 | 3 | 27 | 6 | 46 | 4 |
| AD-1446189.1 | 26 | 5 | 27 | 5 | 42 | 4 |
| AD-1446169.1 | 26 | 5 | 27 | 2 | 52 | 1 |
| AD-1446086.1 | 27 | 5 | 34 | 4 | 47 | 7 |
| AD-1446151.1 | 27 | 7 | 28 | 5 | 32 | 7 |
| AD-1285235.1 | 27 | 5 | 23 | 2 | 34 | 7 |
| AD-1446203.1 | 27 | 7 | 28 | 3 | 37 | 3 |
| AD-1446163.1 | 27 | 4 | 28 | 6 | 47 | 3 |
| AD-1446179.1 | 27 | 2 | 27 | 1 | 41 | 5 |
| AD-1446193.1 | 27 | 3 | 41 | 4 | 50 | 9 |
| AD-1285247.1 | 28 | 5 | 33 | 2 | 42 | 11 |
| AD-1446075.1 | 29 | 4 | 41 | 4 | 51 | 4 |
| AD-1446107.1 | 29 | 3 | 30 | 1 | 43 | 10 |
| AD-1446146.1 | 30 | 4 | 31 | 7 | 43 | 4 |
| AD-1285246.1 | 30 | 6 | 29 | 3 | 38 | 5 |
| AD-1285245.2 | 31 | 1 | 31 | 4 | 40 | 6 |
| AD-1446190.1 | 31 | 6 | 35 | 2 | 49 | 10 |
| AD-1446173.1 | 31 | 4 | 39 | 4 | 56 | 4 |
| AD-1285245.1 | 32 | 3 | 30 | 7 | 43 | 6 |
| AD-1446174.1 | 32 | 4 | 38 | 7 | 59 | 8 |
| AD-1446175.1 | 32 | 3 | 38 | 7 | 59 | 5 |
| AD-1446204.1 | 33 | 4 | 28 | 4 | 41 | 7 |
| AD-1446116.1 | 34 | 5 | 27 | 4 | 35 | 4 |
| AD-1446186.1 | 35 | 10 | 40 | 3 | 57 | 8 |
| AD-1446165.1 | 36 | 5 | 39 | 8 | 52 | 5 |
| AD-1446077.1 | 36 | 2 | 37 | 2 | 53 | 8 |
| AD-1446164.1 | 36 | 2 | 28 | 4 | 46 | 9 |
| AD-1446081.1 | 37 | 3 | 39 | 4 | 52 | 4 |
| AD-1446131.1 | 38 | 5 | 42 | 4 | 55 | 5 |
| AD-1446102.1 | 38 | 7 | 45 | 3 | 54 | 11 |
| AD-1446172.1 | 39 | 5 | 49 | 12 | 61 | 9 |
| AD-1446118.1 | 39 | 10 | 37 | 10 | 50 | 11 |
| AD-1446130.1 | 40 | 10 | 42 | 3 | 60 | 4 |
| AD-1446187.1 | 40 | 5 | 43 | 9 | 59 | 2 |
| AD-1446145.1 | 40 | 6 | 50 | 9 | 69 | 14 |
| AD-1446076.1 | 41 | 4 | 38 | 7 | 43 | 5 |
| AD-1446191.1 | 43 | 4 | 36 | 8 | 43 | 8 |
| AD-1446098.1 | 43 | 12 | 45 | 7 | 56 | 7 |
| AD-1446125.1 | 44 | 7 | 50 | 3 | 55 | 7 |
| AD-1446078.1 | 45 | 10 | 42 | 4 | 56 | 6 |
| AD-1446110.1 | 45 | 9 | 45 | 4 | 51 | 7 |
| AD-1446082.1 | 45 | 6 | 40 | 5 | 51 | 7 |
| AD-1446115.1 | 46 | 6 | 50 | 11 | 65 | 5 |
| AD-1446080.1 | 46 | 8 | 52 | 10 | 70 | 14 |
| AD-1446181.1 | 48 | 2 | 52 | 5 | 74 | 11 |
| AD-1446159.1 | 49 | 3 | 43 | 5 | 46 | 4 |
| AD-1446099.1 | 51 | 7 | 60 | 5 | 74 | 11 |
| AD-1446101.1 | 51 | 1 | 56 | 4 | 65 | 13 |
| AD-1446126.1 | 52 | 8 | 49 | 8 | 59 | 11 |
| AD-1446176.1 | 52 | 9 | 49 | 4 | 61 | 4 |
| AD-1446079.1 | 53 | 3 | 41 | 2 | 42 | 3 |
| AD-1446124.1 | 54 | 3 | 61 | 5 | 67 | 4 |
| AD-1446122.1 | 54 | 3 | 72 | 14 | 74 | 20 |
| AD-1446105.1 | 56 | 14 | 61 | 9 | 74 | 9 |
| AD-1446074.1 | 56 | 7 | 75 | 6 | 76 | 8 |
| AD-1446136.1 | 56 | 9 | 63 | 10 | 79 | 6 |
| AD-1446097.1 | 56 | 9 | 67 | 9 | 74 | 16 |
| AD-1446129.1 | 58 | 6 | 54 | 6 | 55 | 3 |
| AD-1446108.1 | 58 | 7 | 56 | 7 | 64 | 9 |
| AD-1446178.1 | 59 | 6 | 57 | 6 | 77 | 4 |
| AD-1446128.1 | 60 | 10 | 54 | 2 | 68 | 5 |
| AD-1446155.1 | 61 | 7 | 54 | 3 | 67 | 9 |
| AD-1446137.1 | 63 | 9 | 62 | 8 | 77 | 8 |
| AD-1446085.1 | 65 | 5 | 60 | 11 | 72 | 6 |
| AD-1446106.1 | 65 | 5 | 66 | 2 | 64 | 13 |
| AD-1446132.1 | 67 | 1 | 77 | 10 | 85 | 8 |
| AD-1446104.1 | 68 | 17 | 57 | 10 | 68 | 12 |
| AD-1446127.1 | 68 | 6 | 54 | 10 | 56 | 3 |
| AD-1446171.1 | 69 | 10 | 78 | 7 | 88 | 9 |
| AD-1446120.1 | 70 | 14 | 79 | 9 | 79 | 20 |
| AD-1446144.1 | 71 | 7 | 81 | 2 | 86 | 2 |
| AD-1446135.1 | 71 | 6 | 69 | 8 | 84 | 15 |
| AD-1446096.1 | 73 | 7 | 68 | 9 | 89 | 8 |
| AD-1446094.1 | 73 | 10 | 78 | 8 | 76 | 19 |
| AD-1446100.1 | 74 | 8 | 68 | 3 | 79 | 4 |
| AD-1446140.1 | 76 | 13 | 81 | 10 | 83 | 11 |
| AD-1446143.1 | 77 | 5 | 73 | 3 | 78 | 12 |
| AD-1446141.1 | 78 | 9 | 82 | 4 | 89 | 16 |
| AD-1446138.1 | 81 | 8 | 89 | 6 | 97 | 16 |
| AD-1446134.1 | 85 | 14 | 81 | 4 | 89 | 15 |
| AD-1446139.1 | 87 | 12 | 91 | 14 | 90 | 19 |
| AD-1446123.1 | 89 | 28 | 100 | 8 | 94 | 14 |
| AD-1446121.1 | 89 | 3 | 89 | 3 | 91 | 8 |
| AD-1446109.1 | 90 | 8 | 93 | 15 | 100 | 10 |
| AD-1446119.1 | 92 | 5 | 85 | 14 | 83 | 5 |
| AD-1446142.1 | 93 | 19 | 89 | 8 | 87 | 10 |
| AD-1446093.1 | NA | 17 | 21 | 3 | 24 | 2 |

TABLE 7a
C9ORF72 RNA target sequences having ≤50% message
remaining for dosing at 0.1 nM as measured in
Table 7.

| Tar- | Tar- | | SEQ |
|---|---|---|---|
| get | get | | ID |
| Start | End | RNA Target Sequence (NG_031977.2) | NO.: |
| 5035 | 5059 | TGCGTCAAACAGCGACAAGTTCCGC | 51 |
| 5058 | 5087 | GCCCACGTAAAAGATGACGCTTGGTGTGTC | 52 |
| 5197 | 5222 | CTTGCTCTCACAGTACTCGCTGAGGG | 53 |
| 5213 | 5270 | TCGCTGAGGGTGAACAAGAAAAGACCTGATAAA | 54 |
| | | GATTAACCAGAAGAAAACAAGGAGG | |
| 5539 | 5565 | TTACTTTCCCTCTCATTTCTCTGACCG | 55 |
| 5545 | 5570 | TCCCTCTCATTTCTCTGACCGAAGCT | 56 |
| 5916 | 5955 | GGAGACGCCTGCACAATTTCAGCCCAAGCTTCTA | 57 |
| | | GAGAGT | |
| 5935 | 5968 | CAGCCCAAGCTTCTAGAGAGTGGTGATGACTTGC | 58 |
| 5948 | 5976 | TAGAGAGTGGTGATGACTTGCATATGAGG | 59 |
| 6007 | 6030 | CTGTGGGACATGACCTGGTTGCTT | 60 |
| 6012 | 6039 | GGACATGACCTGGTTGCTTCACAGCTCC | 61 |
| 6020 | 6070 | CCTGGTTGCTTCACAGCTCCGAGATGACACAGAC | 62 |
| | | TTGCTTAAAGGAAGTGA | |

TABLE 7b
C9ORF72 RNA target sequences having ≤40% message
remaining for dosing at 0.1 nM as measured in
Table 7.

| Tar- | Tar- | | SEQ |
|---|---|---|---|
| get | get | | ID |
| Start | End | RNA Target Sequence (NG_031977.2) | NO.: |
| 5035 | 5059 | TGCGTCAAACAGCGACAAGTTCCGC | 63 |
| 5059 | 5084 | CCCACGTAAAAGATGACGCTTGGTGT | 64 |
| 5064 | 5087 | GTAAAAGATGACGCTTGGTGTGTC | 65 |
| 5197 | 5222 | CTTGCTCTCACAGTACTCGCTGAGGG | 66 |
| 5213 | 5270 | TCGCTGAGGGTGAACAAGAAAAGACCTGATAAA | 67 |
| | | GATTAACCAGAAGAAAACAAGGAGG | |
| 5539 | 5565 | TTACTTTCCCTCTCATTTCTCTGACCG | 68 |
| 5545 | 5569 | TCCCTCTCATTTCTCTGACCGAAGC | 69 |
| 5921 | 5955 | CGCCTGCACAATTTCAGCCCAAGCTTCTAGAGAG | 70 |
| | | T | |
| 5939 | 5963 | CCAAGCTTCTAGAGAGTGGTGATGA | 71 |
| 5948 | 5973 | TAGAGAGTGGTGATGACTTGCATATG | 72 |
| 6012 | 6039 | GGACATGACCTGGTTGCTTCACAGCTCC | 73 |
| 6036 | 6059 | CTCCGAGATGACACAGACTTGCTT | 74 |
| 6040 | 6066 | GAGATGACACAGACTTGCTTAAAGGAA | 75 |

TABLE 7c
C9ORF72 RNA target sequences having ≤30% message
remaining for dosing at 0.1 nM as measured in
Table 7.

| Tar- | Tar- | | SEQ |
|---|---|---|---|
| get | get | | ID |
| Start | End | RNA Target Sequence (NG_031977.2) | NO.: |
| 5036 | 5059 | GCGTCAAACAGCGACAAGTTCCGC | 76 |
| 5064 | 5087 | GTAAAAGATGACGCTTGGTGTGTC | 77 |
| 5223 | 5270 | TGAACAAGAAAAGACCTGATAAAGATTAACCAG | 78 |
| | | AAGAAAACAAGGAGG | |
| 5539 | 5563 | TTACTTTCCCTCTCATTTCTCTGAC | 79 |
| 5939 | 5962 | CCAAGCTTCTAGAGAGTGGTGATG | 80 |
| 6016 | 6039 | ATGACCTGGTTGCTTCACAGCTCC | 81 |
| 6036 | 6059 | CTCCGAGATGACACAGACTTGCTT | 82 |
| 6040 | 6065 | GAGATGACACAGACTTGCTTAAAGGA | 83 |

TABLE 7d
C9ORF72 RNA target sequences having ≤25% message
remaining for dosing at 0.1 nM as measured in
Table 7.

| Tar- | Tar- | | SEQ |
|---|---|---|---|
| get | get | | ID |
| Start | End | RNA Target Sequence (NG_031977.2) | NO.: |
| 5036 | 5059 | GCGTCAAACAGCGACAAGTTCCGC | 84 |
| 5223 | 5270 | TGAACAAGAAAAGACCTGATAAAGATTAACCAG | 85 |
| | | AAGAAAACAAGGAGG | |
| 5539 | 5562 | TTACTTTCCCTCTCATTTCTCTGA | 86 |
| 6016 | 6039 | ATGACCTGGTTGCTTCACAGCTCC | 87 |
| 6036 | 6059 | CTCCGAGATGACACAGACTTGCTT | 88 |
| 6040 | 6065 | GAGATGACACAGACTTGCTTAAAGGA | 89 |

TABLE 7e
C9ORF72 RNA target sequences having ≤20% message
remaining for dosing at 0.1 nM as measured in
Table 7.

| | | | SEQ |
|---|---|---|---|
| Target | Target | RNA Target Sequence | ID |
| Start | End | (NG_031977.2) | NO.: |
| 5229 | 5252 | AGAAAAGACCTGATAAAGATTAAC | 90 |
| 5233 | 5256 | AAGACCTGATAAAGATTAACCAGA | 91 |
| 5539 | 5562 | TTACTTTCCCTCTCATTTCTCTGA | 92 |
| 6036 | 6059 | CTCCGAGATGACACAGACTTGCTT | 93 |

### Example 3. In Vivo Evaluation in Transgenic Mice

[1064] This Example describes methods for the evaluation of C9orf72 RNAi agents in an allelic series of genetically modified mice (U.S. Pat. No. 10,781,453, WO/2018/064600, US2020/0196581 and WO/2020/131632, the entire contents of each of the foregoing application are herein incorporated by reference). The allelic series comprises a set of mouse ES cells with in which a portion of the mouse C9orf72 gene that includes exons 1A and 1B and adjacent intron sequences is precisely replaced with the homologous fragment from the human C9orf72 gene carrying varying lengths of GGGGCC hexanucleotide repeat expansion (SEQ ID NO: 100) from the normal range of 3 to 30 repeats to over 500 repeats. ES cells of the allelic series are used to derive mice by standard methods, such as the VelociMouse method of 8-cell embryo injection (Poueymirou et al., 2007).

[1065] dsRNA agents designed and assayed in Example 5 are assessed for their ability to reduce the level of sense- or antisense GGGGCC repeat-containing (SEQ ID NO: 100) or intron-containing RNA or spliced RNA from exons 1A and 1B or total C9orf72 mRNA by, for example, in fluorescence situ hybridization (FISH) for RNA foci with strand-specific probes (Exiqon, Inc.), reverse transcription-coupled quantitative PCR (R-qPCR), or by hybridization to strand-specific probes with, for example, Nanostring®, QantiGene®, or Lucerna® assay technologies in mice of the allelic series.

[1066] Briefly, heterozygous or homozygous mice with up to or greater than 500 GGGGCC repeats are administered by intracerebroventrical, intrathecal, or subcutaneous injection a single dose of the dsRNA agents of interest, including duplexes AD-463858, AD-463860, AD-463862. AD-463863, AD-463869, AD-463871. AD-463872, AD-463873, AD-463877, or a placebo. Two to 10 weeks post-administration, animals are sacrificed, blood and tissue samples, including cerebral cortex, spinal cord, liver, spleen, and cervical lymph nodes, are collected, and RNA is purified from the tissue samples. Repeat- or intron-containing or normal RNA produced from the genetically modified C9orf72 gene is assayed by RNA FISH, RT-qPCR, or strand-specific detection methods. Results from mice carrying long GGGGCC repeat expansions up to or greater than 500 repeats are compared to control mice carrying normal repeat lengths of between 3 and 30 repeats.

[1067] In addition to RNA, protein is extracted from and tissues of the mice and assayed for the presence of pathogenic dipeptide repeat proteins, including poly(GlyPro), poly(GlyAla), poly(GlyArg), poly(ProAla), and poly(ProArg), produced by repeat-associated non-AUG and canonical translation of C9orf72 sense and antisense GGGGCC repeat (SEQ ID NO: 100) containing transcripts. Dipeptide repeat proteins and normal C9orf72 proteins are assayed in mouse tissues with available antibodies against the individual dipeptide repeat proteins by immunohistochemistry, western blotting, enzyme-linked immunosorbent assays, and MesoScale Discovery® assays. Results from cells and mice carrying long GGGGCC repeat expansions up to or greater than 500 repeats are compared to cells carrying normal repeat lengths of between 3 and 30 repeats.

[1068] The results demonstrate that administration of the dsRNA agents to mice of the allelic series inhibits the production of sense repeat- and intron-containing and antisense repeat-containing C9orf72 transcripts but has no impact on the level of C9orf72 total and exon 1B-containing mRNA levels. The results also demonstrate that administration of the dsRNA agents inhibits the production of dipeptide repeat proteins derived from the sense and antisense repeat-containing C9orf72 transcripts but has no impact on the level of normal C9orf72 proteins. The results demonstrate that administration of the dsRNA agents reduces the level of sense- and antisense repeat-containing RNA throughout the central nervous system, including the brain, brainstem, and spinal cord. The results demonstrate that maximal reduction of dipeptide repeat proteins produced by mice of the GGGGCC repeat expansion (SEQ ID NO: 100) allelic series is obtained by dsRNA agents that target both the C9orf72 sense and antisense GGGGCC repeat-containing transcripts (SEQ ID NO: 100).

| | | SEQ | | SEQ |
|---|---|---|---|---|
| Duplex | | ID | | ID |
| Name | Sense transSeq | NO: | Antisense transSeq | NO: |
| AD-463858 | ACAAGAAAAGACCUGAUAAAU | 1294 | AUUUAUCAGGUCUUUUCUUGUUC | 1302 |
| AD-463860 | AGAAAAGACCUGAUAAAGAUU | 1295 | AAUCUUUAUCAGGUCUUUUCUUG | 1421 |
| AD-463862 | AAAAGACCUGAUAAAGAUUAA | 599 | UUAAUCUUUAUCAGGUCUUUUCU | 1419 |
| AD-463863 | AAAGACCUGAUAAAGAUUAAU | 1296 | AUUAAUCUUUAUCAGGUCUUUUC | 1303 |
| AD-463869 | CUGAUAAAGAUUAACCAGAAU | 1297 | AUUCUGGUUAAUCUUUAUCAGGU | 1304 |
| AD-463871 | GAUAAAGAUUAACCAGAAGAA | 1298 | UUCUUCUGGUUAAUCUUUAUCAG | 1417 |
| AD-463872 | AUAAAGAUUAACCAGAAGAAA | 1299 | UUUCUUCUGGUUAAUCUUUAUCA | 1416 |
| AD-463873 | AAAGAUUAACCAGAAGAAAAU | 1300 | AUUUUCUUCUGGUUAAUCUUUAU | 1305 |
| AD-463877 | UAACCAGAAGAAAACAAGGAU | 1301 | AUCCUUGUUUUCUUCUGGUUAAU | 1306 |
| | | SEQ | | SEQ |
| Duplex | | ID | | ID |
| Name | Sense oligoSeq | NO: | Antisense oligoSeq | NO: |
| AD-463858 | ascsaagaAfaAfGfAfccugauaaauL96 | 1307 | asUfsuuaUfcAfGfgucuUfuUfcuugususc | 1316 |
| AD-463860 | asgsaaaaGfaCfCfUfgauaaagauuL96 | 1308 | asAfsucuUfuAfUfcaggUfcUfuuucususg | 1317 |
| AD-463862 | asasaagaCfcUfGfAfuaaagauuaaL96 | 1309 | usUfsaauCfuUfUfaucaGfgUfcuuuuscsu | 1318 |
| AD-463863 | asasagacCfuGfAfUfaaagauuaauL96 | 1310 | asUfsuaaUfcUfUfuaucAfgGfucuuususc | 1319 |
| AD-463869 | csusgauaAfaGfAfUfuaaccagaauL96 | 1311 | asUfsucuGfgUfUfaaucUfuUfaucagsgsu | 1320 |
| AD-463871 | gsasuaaaGfaUfUfAfaccagaagaaL96 | 1312 | usUfscuuCfuGfGfuuaaUfcUfuuaucsasg | 1321 |
| AD-463872 | asusaaagAfuUfAfAfccagaagaaaL96 | 1313 | usUfsucuUfcUfGfguuaAfuCfuuuauscsa | 1322 |
| AD-463873 | asasagauUfaAfCfCfagaagaaaauL96 | 1314 | asUfsuuuCfuUfCfugguUfaAfucuuusasu | 1323 |
| AD-463877 | usasaccaGfaAfGfAfaaacaaggauL96 | 1315 | asUfsccuUfgUfUfuucuUfcUfgguuasasu | 1324 |

### Example 4. Additional Agents Targeting C9orf72

[1069] Additional agents targeting C9orf72 were designed and synthesized as described above. The unmodified nucleotide sequences of these agents are provided in Table 8 and the modified nucleotide sequences of these agents are provided in Table 9.

TABLE 8
Unmodified Sense and Antisense Strand Sequences of dsRNA Agents Targeting C90rf72

| | | SEQ | | | SEQ | |
|---|---|---|---|---|---|---|
| Duplex | Sense Sequence | ID | Range in | Antisense Sequence | ID | Range in |
| Name | 5′ to 3′ | NO: | NM_001256054 | 5′ to 3′ | NO: | NM_001256054 |
| AD-1285248 | CAUAUGGACUAUCAAUUAUAA | 1325 | 1092-1112 | UUAUAATUGAUAGUCCAUAUGUG | 1341 | 526-548 |
| AD-1285249 | UGUUGCCAAGACAGAGAUUGA | 1326 | 375-395 | UCAAUCTCUGUCUUGGCAACAGC | 1342 | 233-255 |
| AD-1285250 | CAAGACAGAGAUUGCUUUAAA | 1327 | 2015-2035 | UUUAAAGCAAUCUCUGUCUUGGC | 1343 | 239-261 |
| AD-1285251 | UAAAUGGAGAAAUCCUUCGAA | 1328 | 1092-1112 | UUCGAAGGAUUUCUCCAUUUAGA | 1344 | 400-422 |
| AD-1285252 | UGUGUGUUGAUAGAUUAACAA | 1329 | 594-614 | UUGUUAAUCUAUCAACACACACU | 1345 | 589-611 |
| AD-1285253 | CAGAACUUAGUUUCUACCUCA | 1330 | 3227-3247 | UGAGGUAGAAACUAAGUUCUGUC | 1346 | 556-578 |
| AD-1285254 | ACAGAACUUAGUUUCUACCUA | 1331 | 3228-3248 | UAGGUAGAAACUAAGUUCUGUCU | 1347 | 555-577 |
| AD-1285255 | UGGACUAUCAAUUAUACUUCA | 1332 | 928-948 | UGAAGUAUAAUUGAUAGUCCAUA | 1348 | 530-552 |
| AD-1285256 | AGUGAUGUCGACUCUUUGCCA | 1333 | 760-780 | UGGCAAAGAGUCGACAUCACUGC | 1349 | 197-219 |
| AD-1285257 | AAGACAGAGAUUGCUUUAAGA | 1334 | 1539-1559 | UCUUAAAGCAAUCUCUGUCUUGG | 1350 | 240-262 |
| AD-1285258 | AAUAUUCUUGGUCCUAGAGUA | 1335 | 616-636 | UACUCUAGGACCAAGAAUAUUGU | 1351 | 303-325 |
| AD-1285259 | UGAUACAGUACUCAAUGAUGA | 1336 | 3089-3109 | UCAUCATUGAGUACUGUAUCAGC | 1352 | 806-828 |
| AD-1285260 | UAGCUGAUACAGUACUCAAUA | 1337 | 2131-2151 | UAUUGAGUACUGUAUCAGCUAUA | 1353 | 802-824 |
| AD-1285261 | CUGUCAUGAAGGCUUUCUUCA | 1338 | 373-393 | UGAAGAAAGCCUUCAUGACAGCU | 1354 | 842-864 |
| AD-1285262 | ACAUAUUUAUAAUCAGCGUAA | 1339 | 1006-1026 | UUACGCTGAUUAUAAAUAUGUUC | 1355 | 1169-1191 |
| AD-1285263 | GUCUUACACAGAGACACUCUA | 1340 | 1581-1601 | UAGAGUGUCUCUGUGUAAGACAU | 1356 | 1308-1330 |

TABLE 9
Modified Sense and Antisense Strand Sequences of dsRNA Agents Targeting C90rf72

| | | SEQ | | SEQ |
|---|---|---|---|---|
| Duplex | | ID | | ID |
| Name | Sense Sequence 5′ to 3′ | NO: | Antisense Sequence 5′ to 3′ | NO: |
| AD- | csasuau(Ghd)GfaCfUfAfucaauuausasa | 1357 | VPusUfsauaa(Tgn)ugauagUfcCfauaugsusg | 1373 |
| 1285248 | | | | |
| AD- | usgsuug(Chd)CfaAfGfAfcagagauusgsa | 1358 | VPusCfsaauc(Tgn)cugucuUfgGfcaacasgsc | 1374 |
| 1285249 | | | | |
| AD- | csasaga(Chd)AfgAfGfAfuugcuuuasasa | 1359 | VPusUfsuaaa(Ggn)caaucuCfuGfucuugsgsc | 1375 |
| 1285250 | | | | |
| AD- | usasaau(Ghd)GfaGfAfAfauccuucgsasa | 1360 | VPusUfscgaa(Ggn)gauuucUfcCfauuuasgsa | 1376 |
| 1285251 | | | | |
| AD- | usgsugu(Ghd)UfuGfAfUfagauuaacsasa | 1361 | VPusUfsguua(Agn)ucuaucAfaCfacacascsu | 1377 |
| 1285252 | | | | |
| AD- | csasgaa(Chd)UfuAfGfUfuucuaccuscsa | 1362 | VPusGfsaggu(Agn)gaaacuAfaGfuucugsus | 1378 |
| 1285253 | | | c | |
| AD- | ascsaga(Ahd)CfuUfAfGfuuucuaccsusa | 1363 | VPusAfsggua(Ggn)aaacuaAfgUfucuguscs | 1379 |
| 1285254 | | | u | |
| AD- | usgsgac(Uhd)AfuCfAfAfuuauacuuscsa | 1364 | VPusGfsaagu(Agn)uaauugAfuAfguccasus | 1380 |
| 1285255 | | | a | |
| AD- | asgsuga(Uhd)GfuCfGfAfcucuuugcscsa | 1365 | VPusGfsgcaa(Agn)gagucgAfcAfucacusgsc | 1381 |
| 1285256 | | | | |
| AD- | asasgac(Ahd)GfaGfAfUfugcuuuaasgsa | 1366 | VPusCfsuuaa(Agn)gcaaucUfcUfgucuusgsg | 1382 |
| 1285257 | | | | |
| AD- | asasuau(Uhd)CfuUfGfGfuccuagagsusa | 1367 | VPusAfscucu(Agn)ggaccaAfgAfauauusgs | 1383 |
| 1285258 | | | u | |
| AD- | usgsaua(Chd)AfgUfAfCfucaaugausgsa | 1368 | VPusCfsauca(Tgn)ugaguaCfuGfuaucasgsc | 1384 |
| 1285259 | | | | |
| AD- | usasgcu(Ghd)AfuAfCfAfguacucaasusa | 1369 | VPusAfsuuga(Ggn)uacuguAfuCfagcuasus | 1385 |
| 1285260 | | | a | |
| AD- | csusguc(Ahd)UfgAfAfGfgcuuucuuscs | 1370 | VPusGfsaaga(Agn)agccuuCfaUfgacagscsu | 1386 |
| 1285261 | a | | | |
| AD- | ascsaua(Uhd) UfuAfUfAfaucagcgusasa | 1371 | VPusUfsacgc(Tgn)gauuauAfaAfuaugususc | 1387 |
| 1285262 | | | | |
| AD- | gsuscuu(Ahd)CfaCfAfGfagacacucsusa | 1372 | VPusAfsgagu(Ggn)ucucugUfgUfaagacsas | 1388 |
| 1285263 | | | u | |
| | | | | SEQ |
| | | | | ID |
| | | | mRNA Target Sequence | NO: |
| | | | CACAUAUGGACUAUCAA | 1389 |
| | | | UUAUAC | |
| | | | GCUGUUGCCAAGACAGA | 1390 |
| | | | GAUUGC | |
| | | | GCCAAGACAGAGAUUGC | 1391 |
| | | | UUUAAG | |
| | | | UCUAAAUGGAGAAAUCC | 1392 |
| | | | UUCGAA | |
| | | | AGUGUGUGUUGAUAGA | 1393 |
| | | | U | |
| | | | UAACAC | |
| | | | GACAGAACUUAGUUUCU | 1394 |
| | | | ACCUCC | |
| | | | AGACAGAACUUAGUUUC | 1395 |
| | | | UACCUC | |
| | | | UAUGGACUAUCAAUUAU | 1396 |
| | | | ACUUCC | |
| | | | GCAGUGAUGUCGACUCU | 1397 |
| | | | UUGCCC | |
| | | | CCAAGACAGAGAUUGCU | 1398 |
| | | | UUAAGU | |
| | | | ACAAUAUUCUUGGUCCU | 1399 |
| | | | AGAGUA | |
| | | | GCUGAUACAGUACUCAA | 1400 |
| | | | UGAUGA | |
| | | | UAUAGCUGAUACAGUAC | 1401 |
| | | | UCAAUG | |
| | | | AGCUGUCAUGAAGGCUU | 1402 |
| | | | UCUUCU | |
| | | | GAACAUAUUUAUAAUCA | 1403 |
| | | | GCGUAG | |
| | | | AUGUCUUACACAGAGA | 1404 |
| | | | CACUCUA | |

### Example 5. In Vitro Evaluation of Compostions Comprising Two or More dsRNA Agents Targeting C9orf72

[1070] Sense and antisense repeat expansion RNA detected as cytoplasmic and nuclear foci by fluorescence in situ hybridization (FISH) may sequester RNA binding proteins, leading to cellular toxicity. In addition, dipeptide repeat (DPR) proteins are proposed to be produced from the G₄C₂ repeat expansion (SEQ ID NO: 100) sense and antisense RNA by a non-canonical process that has been termed repeat associated non-AUG (RAN) translation, and there is strong evidence that DPR proteins are cytotoxic. DPR proteins which can be translated from all sense and antisense reading frames. Sense DPR proteins include glycine-alanine, glycine-arginine, and glycine-proline DPR proteins. Antisense DPR proteins include proline-arginine, proline-alanine, and glycine-proline. Because G+C2 (SEQ ID NO: 100) repeat-containing RNAs, either on their own or as templates for dipeptide repeat protein translation, appear to be pathogenic, a general therapeutic strategy is to either inhibit their synthesis or promote their destruction. In the example below, it is demonstrated that siRNAs that target both C9orf72 sense and antisense RNAs are required to achieve maximum knockdown of dipeptide repeat proteins in humanized C9orf72 models.

[1071] RNA interference was explored as a modality for the destruction of C9orf72 G&C2 (SEQ ID NO: 100) repeat-containing RNA. Because the G+C2 repeat (SEQ ID NO: 100) itself and the GC-rich sequence immediately 3′-adjacent are not compatible with specific siRNA design and targeting sequences in exon 1B (E1B) and its adjacent intron could interfere with C9orf72 mRNA, siRNA designs were focused on sense and antisense RNAs carrying sequences derived from the region of the human C9orf72 gene between E1A and the start of the repeat expansion. Four siRNAs were tested, two targeting sense RNA and two targeting antisense transcripts, in mouse ES cells with the 300X repeat expansion allele. The unmodified and modified nucleotide sequences of the agents used are provided in Tables 10A-10D, below.

[1072] The siRNAs targeting sense RNA produced a 50-60% reduction of intron-containing transcripts (FIG. 5A) as determined by a RT-qPCR assay for intron sequence near E1A. The two antisense-targeting siRNAs produced a 40-50% increase in signal with the same assay (FIG. 5A). Combining one of the sense-targeting siRNAs with either of the two antisense-targeting siRNAs did not cause a further knockdown of intron-containing RNA than that produced by the sense-targeting siRNA alone (FIG. 5A). Neither the sense-nor antisense-targeting siRNAs had an appreciable effect on the C9orf72 mRNA (FIG. 5B).

[1073] The effect of the siRNAs on DPR protein synthesis by western slot blotting was also assayed (FIG. 6A). Quantitative analysis of these assays revealed that relative to the vehicle control both sense-targeting siRNAs reduced poly(GlyAla) by approximately 75% (FIG. 6B), while the antisense-targeting siRNAs actually caused a slight increase in poly(Gly Ala) (FIG. 6B), consistent with the moderate increase in intron-containing RNA produced by these siRNAs (FIG. 5A). The combination of sense- and antisense-targeting siRNAs did not enhance the inhibition of poly(GlyAla) achieved by the sense-targeting siRNA alone. The sense-targeting siRNAs inhibited poly(GlyPro) synthesis by approximately 20%, while the antisense-targeting siRNAs produced a stronger 60-70% knockdown (FIG. 6C). Combining the sense- and antisense-targeting siRNAs further reduced poly(GlyPro) synthesis, achieving an approximately 80% knockdown (FIG. 6C). These results support the expectation that a sense RNA serves as the template for translation of poly(GlyAla), while poly(GlyPro) is synthesized from both sense and antisense RNA templates. The stronger inhibition of poly(GlyPro) synthesis achieved with the antisense-targeting siRNAs indicates that the majority of this DPR protein is produced from antisense transcripts in the 300X model. With poly(GlyAla) and poly(GlyPro) as the surrogates for sense (poly(GlyAla), poly(GlyPro), and poly(GlyArg)) and antisense (poly(GlyPro), poly(AlaPro), and poly(ProArg)) RNA DPR synthesis, respectively, the results demonstrate that therapeutic RNAi for C9orf72 ALS may require siRNAs that target both the sense and antisense transcripts to achieve maximal inhibition of DPR protein synthesis.

TABLE 10A
Unmodified Nucleotide Sequences of Antisense-Targeting RNAi Agents

| | | SEQ | | SEQ |
|---|---|---|---|---|
| Duplex | | ID | | ID |
| Name | Sense | NO: | Antisense | NO: |
| AD- | GCUUCGGUCAGAGAAAUGAGA | 116 | UCUCAUUUCUCUGACCGAAGCUG | 1410 |
| 1446213 | | | | |
| AD- | UUCCCUCCUUGUUUUCUUCUA | 149 | UAGAAGAAAACAAGGAGGGAAAC | 239 |
| 1446246 | | | | |
| AD- | CUUUAUCAGGUCUUUUCUUGA | 171 | UCAAGAAAAGACCUGAUAAAGAU | 261 |
| 1446268 | | | | |

TABLE 10B
Unmodified Nucleotide Sequences of Sense-Targeting RNAi Agents

| | | SEQ | Antisense | SEQ |
|---|---|---|---|---|
| Duplex | | ID | | ID |
| Name | Sense | NO: | | NO: |
| AD- | AACAAGAAAAGACCUGAUAAA | 595 | UUUAUCAGGUCUUUUCUUGUUCA | 1422 |
| 1285238 | | | | |
| AD- | AGAAAAGACCUGAUAAAGAUA | 597 | UAUCUUUAUCAGGUCUUUUCUUG | 744 |
| 1285234 | | | | |

TABLE 10C
Modified Nucleotide Sequences of Antisense-Targeting RNAi Agents

| | | SEQ | | SEQ |
|---|---|---|---|---|
| | | ID | | ID |
| Duplex Name | Sense | NO: | Antisense | NO: |
| AD- | gscsuuc(Ghd)GfuCfAfGfagaaaugasgsa | 296 | VPusCfsucaUfuUfCfucugAfcCfgaagcsusg | 386 |
| 1446213.1 | | | | |
| AD- | ususccc(Uhd)CfcUfUfGfuuuucuucsusa | 329 | VPusAfsgaaGfaAfAfacaaGfgAfgggaasasc | 419 |
| 1446246.1 | | | | |
| AD- | csusuua(Uhd)CfaGfGfUfcuuuucuusgsa | 351 | VPusCfsaagAfaAfAfgaccUfgAfuaaagsasu | 441 |
| 1446268.1 | | | | |

TABLE 10D
Modified Nucleotide Sequences of Sense-Targeting RNAi Agents

| | | SEQ | | SEQ |
|---|---|---|---|---|
| Duplex | | ID | | ID |
| Name | Sense | NO: | Antisense | NO: |
| AD- | asascaa(Ghd)AfaAfAfGfaccugauasasa | 884 | VPusUfsuauCfaGfGfucuuUfuCfuuguuscsa | 1033 |
| 1285238.1 | | | | |
| AD- | asgsaaa(Ahd)GfaCfCfUfgauaaagasusa | 886 | VPusAfsucuUfuAfUfcaggUfcUfuuucususg | 1035 |
| 1285234.1 | | | | |

### Example 6. In vivo screening of dsRNA Duplexes in Mice

[1074] Duplexes targeting the antisense strand of intron 1A of C9orf72 were evaluated in vivo.

[1075] Table 11 provides the unmodified sense and antisense strand nucleotide sequences of the agents targeting the antisense strand of C9orf72 intron 1A and Table 12 provides the modified sense and antisense strand nucleotide sequences of the agents targeting the antisense strand of C9orf72 intron 1A used in this study.

[1076] At pre-dose day-14 wild-type mice (C57BL/6) were transduced with either 2×10¹⁰ or 2×10¹¹ viral particles of an adeno-associated virus 8 (AAV8) vector including a region between exon 1A and the repeat expansion of human C9orf72, which includes a portion of intron 1A by intravenous administration. The antisense vector sequence is provided in SEQ ID NO: 94.

[1077] At day 0, groups of three mice were intrathecally administered a single 3 mg/kg dose of the agents of interest, a single 3 mg/kg or 10 mg/kg dose of a dsRNA agent targeting a gene other than C9orf72 as a positive control, or PBS control. At day 14 post-dose animals were sacrificed, brain samples were collected and snap-frozen in liquid nitrogen. Brain RNA was extracted and analyzed by the RT-QPCR method.

[1078] Intronic probes were used to detect the region within the intron. Antisense intron levels of human C9orf72 were compared to a housekeeping gene, GAPDH. The values were then normalized to the average of PBS vehicle control group. The data were expressed as percent of baseline value, and presented as mean plus standard deviation. The results, listed in Table 13 and shown in FIG. 7, demonstrate that the exemplary duplex agents tested that target the antisense strand of intron 1A of human C9orf72 potently reduce the level of the human C9orf92 antisense RNA in vivo.

TABLE 11
Unmodified Nucleotide Sequences of Intron 1A Antisense-Targeting RNAi Agents

| | | SEQ | | SEQ |
|---|---|---|---|---|
| | | ID | | ID |
| Duplex Name | Sense Strand 5′ to 3′ | NO: | Antisense Strand 5′ to 3′ | NO: |
| AD-1721933.1 | CUUUAUCAGGUCUUUUCUUGA | 171 | UCAAGAAAAGACCUGAUAAAGAU | 261 |
| AD-1721934.1 | UUCUGGUUAAUCUUUAUCAGA | 162 | UCUGAUAAAGAUUAACCAGAAGA | 252 |
| AD-1721935.1 | CUUGUUUUCUUCUGGUUAAUA | 155 | UAUUAACCAGAAGAAAACAAGGA | 245 |

TABLE 12
Modified Nucleotide Sequences of Intron 1A Antisense-Targeting RNAi Agents

| | | SEQ | | SEQ |
|---|---|---|---|---|
| Duplex | | ID | | ID |
| Name | Sense Strand 5′ to 3′ | NO: | Antisense Strand 5′ to 3′ | NO: |
| AD- | csusuua(Uhd)CfaGfGfUfcuuuucuugaL96 | 1405 | VPusCfsaagAfaAfAfgaccUfgAfuaaagsasu | 441 |
| 1721933.1 | | | | |
| AD- | ususcug(Ghd)UfuAfAfUfcuuuaucagaL96 | 1406 | VPusCfsugaUfaAfAfgauuAfaCfcagaasgsa | 432 |
| 1721934.1 | | | | |
| AD- | csusugu(Uhd)UfuCfUfUfcugguuaauaL96 | 1407 | VPusAfsuuaAfcCfAfgaagAfaAfacaagsgsa | 425 |
| 1721935.1 | | | | |

TABLE 13

| Group | Animal | | AAV | | | | | normalized | grp |
|---|---|---|---|---|---|---|---|---|---|
| # | # | Treatment | Titer | Dose | avg/mouse | grp avg | stdev | to 100 | average |
| 1 | 1 | PBS | 2.00E+10 | n/a | 145.4583443 | 110.0603 | 42.5617662 | 132.1624 | 100 |
| | 2 | | | | 121.8865945 | | | 110.7452 | |
| | 3 | | | | 62.8360996 | | | 57.09241 | |
| 2 | 4 | Naive | | n/a | 108.7414693 | 82.25354 | 55.868879 | 98.80168 | 74.73495 |
| | 5 | | | | 18.06722083 | | | 16.41574 | |
| | 6 | | | | 119.9519394 | | | 108.9874 | |
| 3 | 7 | AD-64958 | | 3 | 44.82748779 | 49.17021 | 3.84795464 | 40.72992 | 44.67568 |
| | 8 | (control) | | | 52.15540902 | | | 47.38801 | |
| | 9 | | | | 50.52772992 | | | 45.90911 | |
| 4 | 10 | AD-64958 | | 10 | 57.90374506 | 51.88677 | 19.5410098 | 52.61091 | 47.14393 |
| | 11 | (control) | | | 67.7117117 | | | 61.52235 | |
| | 12 | | | | 30.04485251 | | | 27.29853 | |
| 5 | 13 | AD-1721933.1 | | 3 | 31.8631398 | 68.36251 | 32.7786689 | 28.95061 | 62.11366 |
| | 14 | | | | 95.2890682 | | | 86.57893 | |
| | 15 | | | | 77.935321 | | | 70.81144 | |
| 6 | 16 | AD-1721934.1 | | 3 | 82.4652133 | 82.03793 | 10.6144606 | 74.92727 | 74.53904 |
| | 17 | | | | 71.21627551 | | | 64.70657 | |
| | 18 | | | | 92.43229251 | | | 83.98328 | |
| 7 | 19 | AD-1721935.1 | | 3 | 45.68231369 | 75.5266 | 29.5045999 | 41.50661 | 68.6229 |
| | 20 | | | | 76.21814549 | | | 69.25123 | |
| | 21 | | | | 104.6793558 | | | 95.11087 | |
| 8 | 22 | PBS | 2.00E+11 | n/a | 117.7590945 | 106.9963 | 43.5190329 | 110.059 | 100 |
| | 23 | | | | 59.10574588 | | | 55.24093 | |
| | 24 | | | | 144.1240461 | | | 134.7 | |
| 9 | 25 | Naive | | n/a | 122.9141465 | 125.8956 | 17.1442589 | 114.877 | 117.6635 |
| | 26 | | | | 110.4376191 | | | 103.2163 | |
| | 27 | | | | 144.3350411 | | | 134.8972 | |
| 10 | 28 | AD-64958 | | 3 | 78.98649992 | 52.80346 | 23.046316 | 73.82171 | 49.35074 |
| | 29 | (control) | | | 35.59259337 | | | 33.26526 | |
| | 30 | | | | 43.83128886 | | | 40.96524 | |
| 11 | 31 | AD-64958 | | 10 | 103.7821236 | 60.751 | 37.3784316 | 96.996 | 56.77861 |
| | 32 | (control) | | | 36.33902969 | | | 33.96289 | |
| | 33 | | | | 42.13185889 | | | 39.37693 | |
| 12 | 34 | AD-1721933.1 | | | 28.02191177 | 42.90744 | 21.6991653 | 26.18961 | 40.1018 |
| | 35 | | | 3 | 67.80499251 | | | 63.37135 | |
| | 36 | | | | 32.89542331 | | | 30.74445 | |
| 13 | 37 | AD-1721934.1 | | | 68.07513475 | 87.5624 | 17.4973685 | 63.62382 | 81.83686 |
| | 38 | | | 3 | 92.68622676 | | | 86.62564 | |
| | 39 | | | | 101.9258501 | | | 95.2611 | |
| 14 | 40 | AD-1721935.1 | | | 51.21572748 | 46.91163 | 8.93757275 | 47.86682 | 43.84416 |
| | 41 | | | 3 | 36.636385 | | | 34.2408 | |
| | 42 | | | | 52.88276877 | | | 49.42486 | |

| Duplex | | | SEQ ID | | SEQ ID |
|---|---|---|---|---|---|
| ID | Strand | Modified Sequence | NO: | Unmodified Sequence | NO: |
| AD- | sense | asascaguGfuUfCfUfugcucuauaaL96 | 1293 | AACAGUGUUCUUGCUCUAUAA | 103 |
| 64958 | antisense | usUfsauaGfagcaagaAfcAfcuguususu | 102 | UUAUAGAGCAAGAACACUGUUUU | 108 |
| (control) | | | | | |

### Example 7. Mapping of the C9orf72 antisense RNA transcription start site

[1079] Mapping of the transcription start site (TSS) of the antisense transcripts produced by a humanized mouse C9orf72 alleles by 5′-RACE revealed that all of the cDNA clones shared the same sequence, which mapped a single TSS at an adenosine 171 bp downstream of the 3′ end of the exon 1B coding DNA, approximately 270 bp downstream of the GGGGCC hexanucleotide repeat (SEQ ID NO: 100) expansion. To confirm this mapping and measure the abundance of the antisense produced from the TSS, a collection of strand-specific Nanostring® probes was employed to quantify C9orf72 antisense RNA. The probes were designed to hybridize to antisense RNA derived from different regions of the humanized alleles, near the mapped start site (probe I) and both upstream (probe G) and downstream of the start site (probes 3′-rep. 5′-rep, E and A) (FIG. 8). We also designed probes to recognize antisense RNAs that might extend from 200-1200 nucleotides upstream of the start site of mouse sense RNA exon 1A.

[1080] The Nanostring results revealed that in ES cell-derived motor neurons (ESC-MNs) with 96 hexanucleotide repeats (96X) or greater (295X and 545X), antisense RNA was produced from the mapped initiation site (probe I) and extends through the repeat expansion (probes 3′-rep. 5′-rep, E and A) and at least 1500 bp out into the mouse gene's 5′ flanking sequence. Consistent with the mapped start site, no antisense transcripts with probe G was detected. Some antisense transcription was detected at the initiation site (probe I) in the 3X control ESC-MNs, but no significant accumulation of transcripts that elongated into the 3X repeat or beyond. Therefore, productive antisense RNA transcription, that is the accumulation of elongated transcripts, required longer repeat expansions. Accumulation of the extended antisense RNAs is dependent on the humanized allele and repeat expansion greater than 3X.

[1081] The mapping of the antisense RNA TSS and the extension of the elongated transcripts serves as a guide to direct targeting of the antisense RNA destruction by, for example, siRNA-directed RNA interference or antisense oligonucleotide directed RNase H degradation. As the TSS mapped within the human inserted sequence in the humanized mouse alleles, it is highly likely that it is the genuine site used in human cells. Targeting human sequences that span between probe I at the TSS and probe A in exon 1A (i.e., nucleotides 5026-5607 of NG_031977 (SEQ ID NO: 15)) and between probe I at the TSS and probe E in exon 1A (i.e., nucleotides 5130-5607 of NG_031977 (SEQ ID NO: 15)) would be most likely to yield effective therapeutic agents. The Nanostring quantitative probing indicated that the antisense RNAs extend far out into the mouse C9orf72 gene's 5′ flanking sequence. As it is likely that similar extension occurs in human cells, it could be productive to target homologous sequences associated with the human C9orf72 gene.

Informal Sequence Listing

SEQ ID NO: 1
>NM_001256054.2 Homo sapiens C9orf72-SMCR8 complex subunit (C9orf72),
transcript variant 3, mRNA
ACGTAACCTACGGTGTCCCGCTAGGAAAGAGAGGTGCGTCAAACAGCGACAAGTTCCGCCCACGTAAAAG
ATGACGCTTGGTGTGTCAGCCGTCCCTGCTGCCCGGTTGCTTCTCTTTTGGGGGCGGGGTCTAGCAAGAG
CAGGTGTGGGTTTAGGAGATATCTCCGGAGCATTTGGATAATGTGACAGTTGGAATGCAGTGATGTCGAC
TCTTTGCCCACCGCCATCTCCAGCTGTTGCCAAGACAGAGATTGCTTTAAGTGGCAAATCACCTTTATTA
GCAGCTACTTTTGCTTACTGGGACAATATTCTTGGTCCTAGAGTAAGGCACATTTGGGCTCCAAAGACAG
AACAGGTACTTCTCAGTGATGGAGAAATAACTTTTCTTGCCAACCACACTCTAAATGGAGAAATCCTTCG
AAATGCAGAGAGTGGTGCTATAGATGTAAAGTTTTTTGTCTTGTCTGAAAAGGGAGTGATTATTGTTTCA
TTAATCTTTGATGGAAACTGGAATGGGGATCGCAGCACATATGGACTATCAATTATACTTCCACAGACAG
AACTTAGTTTCTACCTCCCACTTCATAGAGTGTGTGTTGATAGATTAACACATATAATCCGGAAAGGAAG
AATATGGATGCATAAGGAAAGACAAGAAAATGTCCAGAAGATTATCTTAGAAGGCACAGAGAGAATGGAA
GATCAGGGTCAGAGTATTATTCCAATGCTTACTGGAGAAGTGATTCCTGTAATGGAACTGCTTTCATCTA
TGAAATCACACAGTGTTCCTGAAGAAATAGATATAGCTGATACAGTACTCAATGATGATGATATTGGTGA
CAGCTGTCATGAAGGCTTTCTTCTCAATGCCATCAGCTCACACTTGCAAACCTGTGGCTGTTCCGTTGTA
GTAGGTAGCAGTGCAGAGAAAGTAAATAAGATAGTCAGAACATTATGCCTTTTTCTGACTCCAGCAGAGA
GAAAATGCTCCAGGTTATGTGAAGCAGAATCATCATTTAAATATGAGTCAGGGCTCTTTGTACAAGGCCT
GCTAAAGGATTCAACTGGAAGCTTTGTGCTGCCTTTCCGGCAAGTCATGTATGCTCCATATCCCACCACA
CACATAGATGTGGATGTCAATACTGTGAAGCAGATGCCACCCTGTCATGAACATATTTATAATCAGCGTA
GATACATGAGATCCGAGCTGACAGCCTTCTGGAGAGCCACTTCAGAAGAAGACATGGCTCAGGATACGAT
CATCTACACTGACGAAAGCTTTACTCCTGATTTGAATATTTTTCAAGATGTCTTACACAGAGACACTCTA
GTGAAAGCCTTCCTGGATCAGGTCTTTCAGCTGAAACCTGGCTTATCTCTCAGAAGTACTTTCCTTGCAC
AGTTTCTACTTGTCCTTCACAGAAAAGCCTTGACACTAATAAAATATATAGAAGACGATACGCAGAAGGG
AAAAAAGCCCTTTAAATCTCTTCGGAACCTGAAGATAGACCTTGATTTAACAGCAGAGGGCGATCTTAAC
ATAATAATGGCTCTGGCTGAGAAAATTAAACCAGGCCTACACTCTTTTATCTTTGGAAGACCTTTCTACA
CTAGTGTGCAAGAACGAGATGTTCTAATGACTTTTTAAATGTGTAACTTAATAAGCCTATTCCATCACAA
TCATGATCGCTGGTAAAGTAGCTCAGTGGTGTGGGGAAACGTTCCCCTGGATCATACTCCAGAATTCTGC
TCTCAGCAATTGCAGTTAAGTAAGTTACACTACAGTTCTCACAAGAGCCTGTGAGGGGATGTCAGGTGCA
TCATTACATTGGGTGTCTCTTTTCCTAGATTTATGCTTTTGGGATACAGACCTATGTTTACAATATAATA
AATATTATTGCTATCTTTTAAAGATATAATAATAGGATGTAAACTTGACCACAACTACTGTTTTTTTGAA
ATACATGATTCATGGTTTACATGTGTCAAGGTGAAATCTGAGTTGGCTTTTACAGATAGTTGACTTTCTA
TCTTTTGGCATTCTTTGGTGTGTAGAATTACTGTAATACTTCTGCAATCAACTGAAAACTAGAGCCTTTA
AATGATTTCAATTCCACAGAAAGAAAGTGAGCTTGAACATAGGATGAGCTTTAGAAAGAAAATTGATCAA
GCAGATGTTTAATTGGAATTGATTATTAGATCCTACTTTGTGGATTTAGTCCCTGGGATTCAGTCTGTAG
AAATGTCTAATAGTTCTCTATAGTCCTTGTTCCTGGTGAACCACAGTTAGGGTGTTTTGTTTATTTTATT
GTTCTTGCTATTGTTGATATTCTATGTAGTTGAGCTCTGTAAAAGGAAATTGTATTTTATGTTTTAGTAA
TTGTTGCCAACTTTTTAAATTAATTTTCATTATTTTTGAGCCAAATTGAAATGTGCACCTCCTGTGCCTT
TTTTCTCCTTAGAAAATCTAATTACTTGGAACAAGTTCAGATTTCACTGGTCAGTCATTTTCATCTTGTT
TTCTTCTTGCTAAGTCTTACCATGTACCTGCTTTGGCAATCATTGCAACTCTGAGATTATAAAATGCCTT
AGAGAATATACTAACTAATAAGATCTTTTTTTCAGAAACAGAAAATAGTTCCTTGAGTACTTCCTTCTTG
CATTTCTGCCTATGTTTTTGAAGTTGTTGCTGTTTGCCTGCAATAGGCTATAAGGAATAGCAGGAGAAAT
TTTACTGAAGTGCTGTTTTCCTAGGTGCTACTTTGGCAGAGCTAAGTTATCTTTTGTTTTCTTAATGCGT
TTGGACCATTTTGCTGGCTATAAAATAACTGATTAATATAATTCTAACACAATGTTGACATTGTAGTTAC
ACAAACACAAATAAATATTTTATTTAAAATTCTGGAAGTAATATAAAAGGGAAAATATATTTATAAGAAA
GGGATAAAGGTAATAGAGCCCTTCTGCCCCCCACCCACCAAATTTACACAACAAAATGACATGTTCGAAT
GTGAAAGGTCATAATAGCTTTCCCATCATGAATCAGAAAGATGTGGACAGCTTGATGTTTTAGACAACCA
CTGAACTAGATGACTGTTGTACTGTAGCTCAGTCATTTAAAAAATATATAAATACTACCTTGTAGTGTCC
CATACTGTGTTTTTTACATGGTAGATTCTTATTTAAGTGCTAACTGGTTATTTTCTTTGGCTGGTTTATT
GTACTGTTATACAGAATGTAAGTTGTACAGTGAAATAAGTTATTAAAGCATGTGTAAACATTGTTATATA
TCTTTTCTCCTAAATGGAGAATTTTGAATAAAATATATTTGAAATTTTAAAAAAAAAAAAAAAAAA
SEQ ID NO: 2
>XM_005581570.2 PREDICTED: Macaca fascicularis chromosome 15 open reading
frame, huma C9orf72 (C15H9orf72), transcript variant X2, mRNA
ACGTAACCTACGGTGTCCCGCTAGGAAAGAGAGGCGCGTCAAACAGCGACAAGTTCCGCCCACGTAAAAG
ATGACGCTTGGTGCGTCAGCCGTCCCTGCTGCCCGGTTCCTTCTCTCTGGGGGCGGGGCCTGGCTAGAGC
AGGTGTGGGTTTAGGAGATATCTCAGGAGCATTTGGATAATGTGACAGTTGGAATGCAGTGATGTCGACT
CTTTGCCCACCGCCATCTCCAGCTGTTGCCAAGACAGAGATTGCTTTAAGTGGTGAATCACCTTTATTAG
CAGCTACTTTTGCTTACTGGGACAATATTCTTGGTCCTAGAGTAAGGCACATTTGGGCTCCAAAGACAGA
ACAGGTACTTCTCAGTGACGGAGAAATAACTTTTCTTGCCAACCACACTCTAAATGGAGAAATCCTTCGA
AATGCAGAGAGTGGTGCTATAGATGTAAAGTTTTTTGTCTTGTCTGAAAAGGGAGTGATTATTGTTTCAT
TAATCTTTGATGGAAACTGGAATGGGGATCGCAGCACATACGGACTATCAATTATACTTCCACAGACAGA
ACTTAGTTTCTACCTCCCACTTCATAGAGTGTGTGTTGATAGATTAACACATATAATCCGGAAAGGAAGA
ATATGGATGCATAAGGAAAGACAAGAAAATGTCCAGAAGATTATCTTAGAAGGCACAGAGAGAATGGAAG
ATCAGGGTCAGAGTATTATTCCAATGCTTACTGGAGAAGTGATTCCTGTAATGGAACTGCTTTCATCTAT
GAAATCACACAGTGTTCCTGAAGAAATAGATATAGCTGATACAGTACTCAATGATGATGATATTGGTGAC
AGTTGTCATGAAGGCTTTCTTCTCAATGCCATCAGCTCACACTTGCAAACCTGTGGCTGTTCCGTTGTAG
TAGGTAGCAGTGCAGAGAAAGTAAATAAGATAGTCAGAACATTATGCCTTTTTCTGACTGCAGCAGAGAG
AAAATGCTCCAGGTTATGTGAAGCAGAATCATCATTTAAATATGAGTCAGGGCTCTTTGTACAGGGCCTG
CTAAAGGATTCAACTGGAAGCTTTGTGCTGCCTTTCCGGCAAGTCATGTATGCTCCATATCCCACCACAC
ACATAGATGTGGATGTCAATACTGTGAAGCAGATGCCACCCTGTCATGAACATATTTATAATCAGCGTAG
ATACATGAGATCCGAGCTGACAGCCTTCTGGAGAGCCACTTCAGAAGAAGACATGGCTCAGGATACGATC
ATCTACACTGACGAAAGCTTTACTCCTGATTTGAATATTTTTCAAGATGTCTTACACAGAGACACTCTAG
TGAAAGCCTTCCTGGATCAGGTCTTTCAGCTGAAACCTGGCTTATCTCTCAGGAGTACTTTCCTTGCACA
GTTTTTACTTGTCCTTCACAGAAAAGCCTTGACACTAATAAAATATATAGAAGATGATACGCAGAAGGGA
AAAAAGCCCTTTAAATCTCTTCGGAACCTGAAGATAGACCTTGATTTAACAGCAGAGGGCGATCTTAACA
TAATAATGGCTCTGGCTGAGAAAATTAAACCAGGCCTACACTCTTTTATCTTTGGAAGACCTTTCTACAC
TAGTGTACAAGAACGAGATGTTCTAATGACTTTTTAAATGTGTAACTTAATAAGCCTATTCCATCACAAT
CGTGATCGCTGCTAAAGTAGCTCGGTGGTGTGGGGAAACATTCCCCTGGATCATACTCCAGAGCTCTGCT
CGGCAGTTGCAGTTAAGTTAGTTACACTACAGTTCTCACAAGAGTCTGTGAGGGGATGTCAGGTGCATCA
TTACATTGGATGTCTCTTTTCCTAGATTTATGCTTTTGGGATACAGACCTATGTTTACAATATAATAGGT
ATTATTGCTGTCTTTTAAATATATAATAATAGGATATAAACTTGACCACAACTGCTGTTTTTTTGAAATA
TATGATTCATGGTTTACATGTATTAAGGTGAAATCCGAGTTCGCTTTTACAGATATTAGTTGACTTTCTA
TCTTTTGGCATTCTTTGGTGTGTGGAATTACTGTAATACTTCTGCAATCAACTGAAAATTAGAGCCTTTA
AATGATTTCAGTTCCACAGAAAGAAAGTGAGCTTCAACATAGGATAAGCTTTAGAAAGAGAATTGATCAA
GCAGATGTTTAATTGGAATTGATTATTAGATCCTGCTTTGTGGATTTAGCCCTCGGGATTCAGTCTGTAG
AAATGTCTGATAGTTCTCTATAGTCCCTGCTCATGGTGAACCACAGTTAGGATGTTTTGTTTGTTTTATT
GTTGTTGCTATTGTTGATGTTCTATATAGTTGAGCTCTGTAAAAGGAAATTGTATTTTATGTTTTAGTAG
TTGTTGCCAACTTTTTAAATTAATTTTCATTATTTTTGAGCCAAATTGAAATGTGCACCTCCTGTGCCTT
TTTTTTCCTTGGAAAATCGAATTACTTGGAAGAAGTTCAGATTTCACTGGTCAGTCGTTTTCATCTTGTT
TTCTTCTTGCAGAGTCTTACCATGTACCTGCTTTGGCAATCATTGTAACTCTGAGATTATAAAATGCATT
AGAGAATATATTAACTAATAAGATCTTTTTTTTCAGGAACAGAAAATAGTTCCTTGAGTACTTCCTTCTT
ACATTTCTGCCCATGTTTTTGAAGTTGTTGCCATTTGCCTGCAATAGGCTATAAGGAATAGCAGGAGAAA
TTTTACTGAAGTGCTATTTTTCTAGGTGCTACTTTGGCAGAGCTAAGTGGTCTGTTTCTTTTGTTTCCTT
AATGCGTTTGGACCATTTTGCTGGCTGTAAAATAACTGATTAATATAATTCTAACACAATATTGACATTG
TAGTGTACACAAACACAAATATTTTATTTAAAACTGGAAGTAACATAAAAGGGAAAATATATTTATAAGA
AAGGAATAAAGGTAATAGAGCTCTTCTGTCCCCCAGCCACCAAATTTACACAACAAAATGATATGTTCTA
ATGTGAAAGGTCATAATAGCTTTCCCATCATTAATCAGAAAGATGTGGCAGCTTGATTTTTCAGACAACC
CCTGAACTAGATGACTGTTGTACTGTAGCTCAGTCATTTAAAAAATATATAAATACTATCTCGTAGTGTC
CCATACTATGTTTTTTACATGATAGATTCTTATTTAAGTGCTACCTGGTTATTTTCTTTGGCTGGTTTAT
TGTACTGTTATATAGAATGTAAGTTGTACAGTGAAATAAGTTATTAAAGCATGTGTAAACATTGTTATAT
ATCTTTTCTCCTAGATGGAGAATTTTGAATAAAATATATTTGAAATTTT
SEQ ID NO: 3
>NM_001081343.2 Mus musculus C9orf72, member of C9orf72-SMCR8 complex
(C9orf72), transcript variant 1, mRNA
GCGGTTGCGGTCCCTGCGCCGGCGGTGAAGGCGCAGCAGCGGCGAGTGGCTATTGCAAGCGTTCGGATAA
TGTGAGACCTGGAATGCAGTGAGACCTGGGATGCAGGGATGTCGACTATCTGCCCCCCACCATCTCCTGC
TGTTGCCAAGACAGAGATTGCTTTAAGTGGTGAATCACCCTTGTTGGCGGCTACCTTTGCTTACTGGGAT
AATATTCTTGGTCCTAGAGTAAGGCATATTTGGGCTCCAAAGACAGACCAAGTGCTTCTCAGTGATGGAG
AAATAACTTTTCTTGCCAACCACACTCTAAATGGAGAAATTCTTCGAAATGCAGAGAGTGGGGCTATAGA
TGTAAAATTTTTTGTCTTATCTGAAAAAGGGGTAATTATTGTTTCATTAATCTTCGACGGAAACTGGAAT
GGAGATCGGAGCACTTATGGACTATCAATTATACTGCCGCAGACAGAGCTGAGCTTCTACCTCCCACTTC
ACAGAGTGTGTGTTGACAGGCTAACACACATTATTCGAAAAGGAAGAATATGGATGCATAAGGAAAGACA
AGAAAATGTCCAGAAAATTGTCTTGGAAGGCACAGAGAGGATGGAAGATCAGGGTCAGAGTATCATTCCC
ATGCTTACTGGGGAAGTCATTCCTGTAATGGAGCTGCTTGCATCTATGAAATCCCACAGTGTTCCTGAAG
ACATTGATATAGCTGATACAGTGCTCAATGATGATGACATTGGTGACAGCTGTCACGAAGGCTTTCTTCT
CAATGCCATCAGCTCACACCTGCAGACCTGTGGCTGTTCCGTTGTAGTTGGCAGCAGTGCAGAGAAAGTA
AATAAGATAGTAAGAACGCTGTGCCTTTTTCTGACACCAGCAGAGAGGAAATGCTCCAGGCTGTGTGAAG
CAGAATCGTCCTTTAAGTACGAATCGGGACTCTTTGTGCAAGGCTTGCTAAAGGATGCAACAGGCAGTTT
TGTCCTACCCTTCCGGCAAGTTATGTATGCCCCGTACCCCACCACGCACATTGATGTGGATGTCAACACT
GTCAAGCAGATGCCACCGTGTCATGAACATATTTATAATCAACGCAGATACATGAGGTCAGAGCTGACAG
CCTTCTGGAGGGCAACTTCAGAAGAGGACATGGCGCAGGACACCATCATCTACACAGATGAGAGCTTCAC
TCCTGATTTGAATATTTTCCAAGATGTCTTACACAGAGACACTCTAGTGAAAGCCTTCCTGGATCAGGTC
TTCCATTTGAAGCCTGGCCTGTCTCTCAGGAGTACTTTCCTTGCACAGTTCCTCCTCATTCTTCACAGAA
AAGCCTTGACACTAATCAAGTACATCGAGGATGATACGCAGAAGGGGAAAAAGCCCTTTAAGTCTCTTCG
GAACCTGAAGATAGATCTTGATTTAACAGCAGAGGGCGATCTTAACATAATAATGGCTCTAGCTGAGAAA
ATTAAGCCAGGCCTACACTCTTTCATCTTTGGGAGACCTTTCTACACTAGTGTACAAGAACGTGATGTTC
TAATGACCTTTTGACCGTGTGGTTTGCTGTGTCTGTCTCTTCACAGTCACACCTGCTGTTACAGTGTCTC
AGCAGTGTGTGGGCACATCCTTCCTCCCGAGTCCTGCTGCAGGACAGGGTACACTACACTTGTCAGTAGA
AGTCTGTACCTGATGTCAGGTGCATCGTTACAGTGAATGACTCTTCCTAGAATAGATGTACTCTTTTAGG
GCCTTATGTTTACAATTATCCTAAGTACTATTGCTGTCTTTTAAAGATATGAATGATGGAATATACACTT
GACCATAACTGCTGATTGGTTTTTTGTTTTGTTTTGTTTGTTTTCTTGGAAACTTATGATTCCTGGTTTA
CATGTACCACACTGAAACCCTCGTTAGCTTTACAGATAAAGTGTGAGTTGACTTCCTGCCCCTCTGTGTT
CTGTGGTATGTCCGATTACTTCTGCCACAGCTAAACATTAGAGCATTTAAAGTTTGCAGTTCCTCAGAAA
GGAACTTAGTCTGACTACAGATTAGTTCTTGAGAGAAGACACTGATAGGGCAGAGCTGTAGGTGAAATCA
GTTGTTAGCCCTTCCTTTATAGACGTAGTCCTTCAGATTCGGTCTGTACAGAAATGCCGAGGGGTCATGC
ATGGGCCCTGAGTATCGTGACCTGTGACAAGTTTTTTGTTGGTTTATTGTAGTTCTGTCAAAGAAAGTGG
CATTTGTTTTTATAATTGTTGCCAACTTTTAAGGTTAATTTTCATTATTTTTGAGCCGAATTAAAATGCG
CACCTCCTGTGCCTTTCCCAATCTTGGAAAATATAATTTCTTGGCAGAGGGTCAGATTTCAGGGCCCAGT
CACTTTCATCTGACCACCCTTTGCACGGCTGCCGTGTGCCTGGCTTAGATTAGAAGTCCTTGTTAAGTAT
GTCAGAGTACATTCGCTGATAAGATCTTTGAAGAGCAGGGAAGCGTCTTGCCTCTTTCCTTTGGTTTCTG
CCTGTACTCTGGTGTTTCCCGTGTCACCTGCATCATAGGAACAGCAGAGAAATCTGACCCAGTGCTATTT
TTCTAGGTGCTACTATGGCAAACTCAAGTGGTCTGTTTCTGTTCCTGTAACGTTCGACTATCTCGCTAGC
TGTGAAGTACTGATTAGTGGAGTTCTGTGCAACAGCAGTGTAGGAGTATACACAAACACAAATATGTGTT
TCTATTTAAAACTGTGGACTTAGCATAAAAAGGGAGAATATATTTATTTTTTACAAAAGGGATAAAAATG
GGCCCCGTTCCTCACCCACCAGATTTAGCGAGAAAAAGCTTTCTATTCTGAAAGGTCACGGTGGCTTTGG
CATTACAAATCAGAACAACACACACTGACCATGATGGCTTGTGAACTAACTGCAAGGCACTCCGTCATGG
TAAGCGAGTAGGTCCCACCTCCTAGTGTGCCGCTCATTGCTTTACACAGTAGAATCTTATTTGAGTGCTA
ATTGTTGTCTTTGCTGCTTTACTGTGTTGTTATAGAAAATGTAAGCTGTACAGTGAATAAGTTATTGAAG
CATGTGTAAACACTGTTATATATCTTTTCTCCTAGATGGGGAATTTTGAATAAAATACCTTTGAAATTCT
G
SEQ ID NO: 4
>NM_001007702.1 Rattus norvegicus similar to RIKEN CDNA 3110043021
(RGD1359108), mRNA
CGTTTGTAGTGTCAGCCATCCCAATTGCCTGTTCCTTCTCTGTGGGAGTGGTGTCTAGACAGTCCAGGCA
GGGTATGCTAGGCAGGTGCGTTTTGGTTGCCTCAGATCGCAACTTGACTCCATAACGGTGACCAAAGACA
AAAGAAGGAAACCAGATTAAAAAGAACCGGACACAGACCCCTGCAGAATCTGGAGCGGCCGTGGTTGGGG
GCGGGGCTACGACGGGGCGGACTCGGGGGCGTGGGAGGGCGGGGCCGGGGCGGGGCCCGGAGCCGGCTGC
GGTTGCGGTCCCTGCGCCGGCGGTGAAGGCGCAGCGGCGGCGAGTGGCTATTGCAAGCGTTTGGATAATG
TGAGACCTGGGATGCAGGGATGTCGACTATCTGCCCCCCACCATCTCCTGCTGTTGCCAAGACAGAGATT
GCTTTAAGTGGTGAATCACCCTTGTTGGCGGCTACCTTTGCTTACTGGGATAATATTCTTGGTCCTAGAG
TAAGGCACATTTGGGCTCCAAAGACAGACCAAGTACTCCTCAGTGATGGAGAAATCACTTTTCTTGCCAA
CCACACTCTGAATGGAGAAATTCTTCGGAATGCGGAGAGTGGGGCAATAGATGTAAAGTTTTTTGTCTTA
TCTGAAAAGGGCGTCATTATTGTTTCATTAATCTTCGACGGGAACTGGAACGGAGATCGGAGCACTTACG
GACTATCAATTATACTGCCGCAGACGGAGCTGAGTTTCTACCTCCCACTGCACAGAGTGTGTGTTGACAG
GCTAACGCACATCATTCGAAAAGGAAGGATATGGATGCACAAGGAAAGACAAGAAAATGTCCAGAAAATT
GTCTTGGAAGGCACCGAGAGGATGGAAGATCAGGGTCAGAGTATCATCCCTATGCTTACTGGGGAGGTCA
TCCCTGTGATGGAGCTGCTTGCGTCTATGAGATCACACAGTGTTCCTGAAGACCTCGATATAGCTGATAC
AGTACTCAATGATGATGACATTGGTGACAGCTGTCATGAAGGCTTTCTTCTCAATGCCATCAGCTCACAT
CTGCAGACCTGCGGCTGTTCTGTGGTGGTAGGCAGCAGTGCAGAGAAAGTAAATAAGATAGTAAGAACAC
TGTGCCTTTTTCTGACACCAGCAGAGAGGAAGTGCTCCAGGCTGTGTGAAGCCGAATCGTCCTTTAAATA
CGAATCTGGACTCTTTGTACAAGGCTTGCTAAAGGATGCGACTGGCAGTTTTGTACTACCTTTCCGGCAA
GTTATGTATGCCCCTTATCCCACCACACACATCGATGTGGATGTCAACACTGTCAAGCAGATGCCACCGT
GTCATGAACATATTTATAATCAACGCAGATACATGAGGTCAGAGCTGACAGCCTTCTGGAGGGCAACTTC
AGAAGAGGACATGGCTCAGGACACCATCATCTACACAGATGAGAGCTTCACTCCTGATTTGAATATTTTC
CAAGATGTCTTACACAGAGACACTCTAGTGAAAGCCTTTCTGGATCAGGTCTTCCATTTGAAGCCTGGCC
TGTCTCTCAGGAGTACTTTCCTTGCACAGTTCCTCCTCATTCTTCACAGAAAAGCCTTGACACTAATCAA
GTACATAGAGGATGACACGCAGAAGGGGAAAAAGCCCTTTAAGTCTCTTCGGAACCTGAAGATAGATCTT
GATTTAACAGCAGAGGGCGACCTTAACATAATAATGGCTCTAGCTGAGAAAATTAAGCCAGGCCTACACT
CTTTCATCTTCGGGAGACCTTTCTACACTAGTGTCCAAGAACGTGATGTTCTAATGACTTTTTAAACATG
TGGTTTGCTCCGTGTGTCTCATGACAGTCACACTTGCTGTTACAGTGTCTCAGCGCTTTGGACACATCCT
TCCTCCAGGGTCCTGCCGCAGGACACGTTACACTACACTTGTCAGTAGAGGTCTGTACCAGATGTCAGGT
ACATCGTTGTAGTGAATGTCTCTTTTCCTAGACTAGATGTACCCTCGTAGGGACTTATGTTTACAACCCT
CCTAAGTACTAGTGCTGTCTTGTAAGGATACGAATGAAGGGATGTAAACTTCACCACAACTGCTGGTTGG
TTTTGTTGTTTTTGTTTTTTGAAACTTATAATTCATGGTTTACATGCATCACACTGAAACCCTAGTTAGC
TTTTTACAGGTAAGCTGTGAGTTGACTGCCTGTCCCTGTGTTCTCTGGCCTGTACGATCTGTGGCGTGTA
GGATCACTTTTGCAACAACTAAAAACTAAAGCACTTTGTTTGCAGTTCTACAGAAAGCAACTTAGTCTGT
CTGCAGATTCGTTTTTGAAAGAAGACATGAGAAAGCGGAGTTTTAGGTGAAGTCAGTTGTTGGATCTTCC
TTTATAGACTTAGTCCTTTAGATGTGGTCTGTATAGACATGCCCAACCATCATGCATGGGCACTGAATAT
CGTGAACTGTGGTATGCTTTTTGTTGGTTTATTGTACTTCTGTCAAAGAAAGTGGCATTGGTTTTTATAA
TTGTTGCCAAGTTTTAAGGTTAATTTTCATTATTTTTGAGCCAAATTAAAATGTGCACCTCCTGTGCCTT
TCCCAATCTTGGAAAATATAATTTCTTGGCAGAAGGTCAGATTTCAGGGCCCAGTCACTTTCGTCTGACT
TCCCTTTGCACAGTCCGCCATGGGCCTGGCTTAGAAGTTCTTGTAAACTATGCCAGAGAGTACATTCGCT
GATAAAATCTTCTTTGCAGAGCAGGAGAGCTTCTTGCCTCTTTCCTTTCATTTCTGCCTGGACTTTGGTG
TTCTCCACGTTCCCTGCATCCTAAGGACAGCAGGAGAACTCTGACCCCAGTGCTATTTCTCTAGGTGCTA
TTGTGGCAAACTCAAGCGGTCCGTCTCTGTCCCTGTAACGTTCGTACCTTGCTGGCTGTGAAGTACTGAC
TGGTAAAGCTCCGTGCTACAGCAGTGTAGGGTATACACAAACACAAGTAAGTGTTTTATTTAAAACTGTG
GACTTAGCATAAAAAGGGAGACTATATTTATTTTTTACAAAAGGGATAAAAATGGAACCCTTTCCTCACC
CACCAGATTTAGTCAGAAAAAAACATTCTATTCTGAAAGGTCACAGTGGTTTTGACATGACACATCAGAA
CAACGCACACTGTCCATGATGGCTTATGAACTCCAAGTCACTCCATCATGGTAAATGGGTAGATCCCTCC
TTCTAGTGTGCCACACCATTGCTTCCCACAGTAGAATCTTATTTAAGTGCTAAGTGTTGTCTCTGCTGGT
TTACTCTGTTGTTTTAGAGAATGTAAGTTGTATAGTGAATAAGTTATTGAAGCATGTGTAAACACTGTTA
TACATCTTTTCTCCTAGATGGGGAATTTGGAATAAAATACCTTTAAAATTCAAAAAAAAAAAAAAAAAAA
AAAAA
SEQ ID NO: 5
>Reverse Complement of SEQ ID NO: 1
TTTTTTTTTTTTTTTTTTAAAATTTCAAATATATTTTATTCAAAATTCTCCATTTAGGAGAAAAGATATATAACA
ATGTTTACACATGCTTTAATAACTTATTTCACTGTACAACTTACATTCTGTATAACAGTACAATAAACCAGCCAA
AGAAAATAACCAGTTAGCACTTAAATAAGAATCTACCATGTAAAAAACACAGTATGGGACACTACAAGGTAGTAT
TTATATATTTTTTAAATGACTGAGCTACAGTACAACAGTCATCTAGTTCAGTGGTTGTCTAAAACATCAAGCTGT
CCACATCTTTCTGATTCATGATGGGAAAGCTATTATGACCTTTCACATTCGAACATGTCATTTTGTTGTGTAAAT
TTGGTGGGTGGGGGGCAGAAGGGCTCTATTACCTTTATCCCTTTCTTATAAATATATTTTCCCTTTTATATTACT
TCCAGAATTTTAAATAAAATATTTATTTGTGTTTGTGTAACTACAATGTCAACATTGTGTTAGAATTATATTAAT
CAGTTATTTTATAGCCAGCAAAATGGTCCAAACGCATTAAGAAAACAAAAGATAACTTAGCTCTGCCAAAGTAGC
ACCTAGGAAAACAGCACTTCAGTAAAATTTCTCCTGCTATTCCTTATAGCCTATTGCAGGCAAACAGCAACAACT
TCAAAAACATAGGCAGAAATGCAAGAAGGAAGTACTCAAGGAACTATTTTCTGTTTCTGAAAAAAAGATCTTATT
AGTTAGTATATTCTCTAAGGCATTTTATAATCTCAGAGTTGCAATGATTGCCAAAGCAGGTACATGGTAAGACTT
AGCAAGAAGAAAACAAGATGAAAATGACTGACCAGTGAAATCTGAACTTGTTCCAAGTAATTAGATTTTCTAAGG
AGAAAAAAGGCACAGGAGGTGCACATTTCAATTTGGCTCAAAAATAATGAAAATTAATTTAAAAAGTTGGCAACA
ATTACTAAAACATAAAATACAATTTCCTTTTACAGAGCTCAACTACATAGAATATCAACAATAGCAAGAACAATA
AAATAAACAAAACACCCTAACTGTGGTTCACCAGGAACAAGGACTATAGAGAACTATTAGACATTTCTACAGACT
GAATCCCAGGGACTAAATCCACAAAGTAGGATCTAATAATCAATTCCAATTAAACATCTGCTTGATCAATTTTCT
TTCTAAAGCTCATCCTATGTTCAAGCTCACTTTCTTTCTGTGGAATTGAAATCATTTAAAGGCTCTAGTTTTCAG
TTGATTGCAGAAGTATTACAGTAATTCTACACACCAAAGAATGCCAAAAGATAGAAAGTCAACTATCTGTAAAAG
CCAACTCAGATTTCACCTTGACACATGTAAACCATGAATCATGTATTTCAAAAAAACAGTAGTTGTGGTCAAGTT
TACATCCTATTATTATATCTTTAAAAGATAGCAATAATATTTATTATATTGTAAACATAGGTCTGTATCCCAAAA
GCATAAATCTAGGAAAAGAGACACCCAATGTAATGATGCACCTGACATCCCCTCACAGGCTCTTGTGAGAACTGT
AGTGTAACTTACTTAACTGCAATTGCTGAGAGCAGAATTCTGGAGTATGATCCAGGGGAACGTTTCCCCACACCA
CTGAGCTACTTTACCAGCGATCATGATTGTGATGGAATAGGCTTATTAAGTTACACATTTAAAAAGTCATTAGAA
CATCTCGTTCTTGCACACTAGTGTAGAAAGGTCTTCCAAAGATAAAAGAGTGTAGGCCTGGTTTAATTTTCTCAG
CCAGAGCCATTATTATGTTAAGATCGCCCTCTGCTGTTAAATCAAGGTCTATCTTCAGGTTCCGAAGAGATTTAA
AGGGCTTTTTTCCCTTCTGCGTATCGTCTTCTATATATTTTATTAGTGTCAAGGCTTTTCTGTGAAGGACAAGTA
GAAACTGTGCAAGGAAAGTACTTCTGAGAGATAAGCCAGGTTTCAGCTGAAAGACCTGATCCAGGAAGGCTTTCA
CTAGAGTGTCTCTGTGTAAGACATCTTGAAAAATATTCAAATCAGGAGTAAAGCTTTCGTCAGTGTAGATGATCG
TATCCTGAGCCATGTCTTCTTCTGAAGTGGCTCTCCAGAAGGCTGTCAGCTCGGATCTCATGTATCTACGCTGAT
TATAAATATGTTCATGACAGGGTGGCATCTGCTTCACAGTATTGACATCCACATCTATGTGTGTGGTGGGATATG
GAGCATACATGACTTGCCGGAAAGGCAGCACAAAGCTTCCAGTTGAATCCTTTAGCAGGCCTTGTACAAAGAGCC
CTGACTCATATTTAAATGATGATTCTGCTTCACATAACCTGGAGCATTTTCTCTCTGCTGGAGTCAGAAAAAGGC
ATAATGTTCTGACTATCTTATTTACTTTCTCTGCACTGCTACCTACTACAACGGAACAGCCACAGGTTTGCAAGT
GTGAGCTGATGGCATTGAGAAGAAAGCCTTCATGACAGCTGTCACCAATATCATCATCATTGAGTACTGTATCAG
CTATATCTATTTCTTCAGGAACACTGTGTGATTTCATAGATGAAAGCAGTTCCATTACAGGAATCACTTCTCCAG
TAAGCATTGGAATAATACTCTGACCCTGATCTTCCATTCTCTCTGTGCCTTCTAAGATAATCTTCTGGACATTTT
CTTGTCTTTCCTTATGCATCCATATTCTTCCTTTCCGGATTATATGTGTTAATCTATCAACACACACTCTATGAA
GTGGGAGGTAGAAACTAAGTTCTGTCTGTGGAAGTATAATTGATAGTCCATATGTGCTGCGATCCCCATTCCAGT
TTCCATCAAAGATTAATGAAACAATAATCACTCCCTTTTCAGACAAGACAAAAAACTTTACATCTATAGCACCAC
TCTCTGCATTTCGAAGGATTTCTCCATTTAGAGTGTGGTTGGCAAGAAAAGTTATTTCTCCATCACTGAGAAGTA
CCTGTTCTGTCTTTGGAGCCCAAATGTGCCTTACTCTAGGACCAAGAATATTGTCCCAGTAAGCAAAAGTAGCTG
CTAATAAAGGTGATTTGCCACTTAAAGCAATCTCTGTCTTGGCAACAGCTGGAGATGGCGGTGGGCAAAGAGTCG
ACATCACTGCATTCCAACTGTCACATTATCCAAATGCTCCGGAGATATCTCCTAAACCCACACCTGCTCTTGCTA
GACCCCGCCCCCAAAAGAGAAGCAACCGGGCAGCAGGGACGGCTGACACACCAAGCGTCATCTTTTACGTGGGCG
GAACTTGTCGCTGTTTGACGCACCTCTCTTTCCTAGCGGGACACCGTAGGTTACGT
SEQ ID NO: 6
>Reverse Complement of SEQ ID NO: 2
AAAATTTCAAATATATTTTATTCAAAATTCTCCATCTAGGAGAAAAGATATATAACAATGTTTACACATGCTTTA
ATAACTTATTTCACTGTACAACTTACATTCTATATAACAGTACAATAAACCAGCCAAAGAAAATAACCAGGTAGC
ACTTAAATAAGAATCTATCATGTAAAAAACATAGTATGGGACACTACGAGATAGTATTTATATATTTTTTAAATG
ACTGAGCTACAGTACAACAGTCATCTAGTTCAGGGGTTGTCTGAAAAATCAAGCTGCCACATCTTTCTGATTAAT
GATGGGAAAGCTATTATGACCTTTCACATTAGAACATATCATTTTGTTGTGTAAATTTGGTGGCTGGGGGACAGA
AGAGCTCTATTACCTTTATTCCTTTCTTATAAATATATTTTCCCTTTTATGTTACTTCCAGTTTTAAATAAAATA
TTTGTGTTTGTGTACACTACAATGTCAATATTGTGTTAGAATTATATTAATCAGTTATTTTACAGCCAGCAAAAT
GGTCCAAACGCATTAAGGAAACAAAAGAAACAGACCACTTAGCTCTGCCAAAGTAGCACCTAGAAAAATAGCACT
TCAGTAAAATTTCTCCTGCTATTCCTTATAGCCTATTGCAGGCAAATGGCAACAACTTCAAAAACATGGGCAGAA
ATGTAAGAAGGAAGTACTCAAGGAACTATTTTCTGTTCCTGAAAAAAAAGATCTTATTAGTTAATATATTCTCTA
ATGCATTTTATAATCTCAGAGTTACAATGATTGCCAAAGCAGGTACATGGTAAGACTCTGCAAGAAGAAAACAAG
ATGAAAACGACTGACCAGTGAAATCTGAACTTCTTCCAAGTAATTCGATTTTCCAAGGAAAAAAAAGGCACAGGA
GGTGCACATTTCAATTTGGCTCAAAAATAATGAAAATTAATTTAAAAAGTTGGCAACAACTACTAAAACATAAAA
TACAATTTCCTTTTACAGAGCTCAACTATATAGAACATCAACAATAGCAACAACAATAAAACAAACAAAACATCC
TAACTGTGGTTCACCATGAGCAGGGACTATAGAGAACTATCAGACATTTCTACAGACTGAATCCCGAGGGCTAAA
TCCACAAAGCAGGATCTAATAATCAATTCCAATTAAACATCTGCTTGATCAATTCTCTTTCTAAAGCTTATCCTA
TGTTGAAGCTCACTTTCTTTCTGTGGAACTGAAATCATTTAAAGGCTCTAATTTTCAGTTGATTGCAGAAGTATT
ACAGTAATTCCACACACCAAAGAATGCCAAAAGATAGAAAGTCAACTAATATCTGTAAAAGCGAACTCGGATTTC
ACCTTAATACATGTAAACCATGAATCATATATTTCAAAAAAACAGCAGTTGTGGTCAAGTTTATATCCTATTATT
ATATATTTAAAAGACAGCAATAATACCTATTATATTGTAAACATAGGTCTGTATCCCAAAAGCATAAATCTAGGA
AAAGAGACATCCAATGTAATGATGCACCTGACATCCCCTCACAGACTCTTGTGAGAACTGTAGTGTAACTAACTT
AACTGCAACTGCCGAGCAGAGCTCTGGAGTATGATCCAGGGGAATGTTTCCCCACACCACCGAGCTACTTTAGCA
GCGATCACGATTGTGATGGAATAGGCTTATTAAGTTACACATTTAAAAAGTCATTAGAACATCTCGTTCTTGTAC
ACTAGTGTAGAAAGGTCTTCCAAAGATAAAAGAGTGTAGGCCTGGTTTAATTTTCTCAGCCAGAGCCATTATTAT
GTTAAGATCGCCCTCTGCTGTTAAATCAAGGTCTATCTTCAGGTTCCGAAGAGATTTAAAGGGCTTTTTTCCCTT
CTGCGTATCATCTTCTATATATTTTATTAGTGTCAAGGCTTTTCTGTGAAGGACAAGTAAAAACTGTGCAAGGAA
AGTACTCCTGAGAGATAAGCCAGGTTTCAGCTGAAAGACCTGATCCAGGAAGGCTTTCACTAGAGTGTCTCTGTG
TAAGACATCTTGAAAAATATTCAAATCAGGAGTAAAGCTTTCGTCAGTGTAGATGATCGTATCCTGAGCCATGTC
TTCTTCTGAAGTGGCTCTCCAGAAGGCTGTCAGCTCGGATCTCATGTATCTACGCTGATTATAAATATGTTCATG
ACAGGGTGGCATCTGCTTCACAGTATTGACATCCACATCTATGTGTGTGGTGGGATATGGAGCATACATGACTTG
CCGGAAAGGCAGCACAAAGCTTCCAGTTGAATCCTTTAGCAGGCCCTGTACAAAGAGCCCTGACTCATATTTAAA
TGATGATTCTGCTTCACATAACCTGGAGCATTTTCTCTCTGCTGCAGTCAGAAAAAGGCATAATGTTCTGACTAT
CTTATTTACTTTCTCTGCACTGCTACCTACTACAACGGAACAGCCACAGGTTTGCAAGTGTGAGCTGATGGCATT
GAGAAGAAAGCCTTCATGACAACTGTCACCAATATCATCATCATTGAGTACTGTATCAGCTATATCTATTTCTTC
AGGAACACTGTGTGATTTCATAGATGAAAGCAGTTCCATTACAGGAATCACTTCTCCAGTAAGCATTGGAATAAT
ACTCTGACCCTGATCTTCCATTCTCTCTGTGCCTTCTAAGATAATCTTCTGGACATTTTCTTGTCTTTCCTTATG
CATCCATATTCTTCCTTTCCGGATTATATGTGTTAATCTATCAACACACACTCTATGAAGTGGGAGGTAGAAACT
AAGTTCTGTCTGTGGAAGTATAATTGATAGTCCGTATGTGCTGCGATCCCCATTCCAGTTTCCATCAAAGATTAA
TGAAACAATAATCACTCCCTTTTCAGACAAGACAAAAAACTTTACATCTATAGCACCACTCTCTGCATTTCGAAG
GATTTCTCCATTTAGAGTGTGGTTGGCAAGAAAAGTTATTTCTCCGTCACTGAGAAGTACCTGTTCTGTCTTTGG
AGCCCAAATGTGCCTTACTCTAGGACCAAGAATATTGTCCCAGTAAGCAAAAGTAGCTGCTAATAAAGGTGATTC
ACCACTTAAAGCAATCTCTGTCTTGGCAACAGCTGGAGATGGCGGTGGGCAAAGAGTCGACATCACTGCATTCCA
ACTGTCACATTATCCAAATGCTCCTGAGATATCTCCTAAACCCACACCTGCTCTAGCCAGGCCCCGCCCCCAGAG
AGAAGGAACCGGGCAGCAGGGACGGCTGACGCACCAAGCGTCATCTTTTACGTGGGCGGAACTTGTCGCTGTTTG
ACGCGCCTCTCTTTCCTAGCGGGACACCGTAGGTTACGT
SEQ ID NO: 7
>Reverse Complement of SEQ ID NO: 123 SEQ ID NO: 3
CAGAATTTCAAAGGTATTTTATTCAAAATTCCCCATCTAGGAGAAAAGATATATAACAGTGTTTACACATGCTTC
AATAACTTATTCACTGTACAGCTTACATTTTCTATAACAACACAGTAAAGCAGCAAAGACAACAATTAGCACTCA
AATAAGATTCTACTGTGTAAAGCAATGAGCGGCACACTAGGAGGTGGGACCTACTCGCTTACCATGACGGAGTGC
CTTGCAGTTAGTTCACAAGCCATCATGGTCAGTGTGTGTTGTTCTGATTTGTAATGCCAAAGCCACCGTGACCTT
TCAGAATAGAAAGCTTTTTCTCGCTAAATCTGGTGGGTGAGGAACGGGGCCCATTTTTATCCCTTTTGTAAAAAA
TAAATATATTCTCCCTTTTTATGCTAAGTCCACAGTTTTAAATAGAAACACATATTTGTGTTTGTGTATACTCCT
ACACTGCTGTTGCACAGAACTCCACTAATCAGTACTTCACAGCTAGCGAGATAGTCGAACGTTACAGGAACAGAA
ACAGACCACTTGAGTTTGCCATAGTAGCACCTAGAAAAATAGCACTGGGTCAGATTTCTCTGCTGTTCCTATGAT
GCAGGTGACACGGGAAACACCAGAGTACAGGCAGAAACCAAAGGAAAGAGGCAAGACGCTTCCCTGCTCTTCAAA
GATCTTATCAGCGAATGTACTCTGACATACTTAACAAGGACTTCTAATCTAAGCCAGGCACACGGCAGCCGTGCA
AAGGGTGGTCAGATGAAAGTGACTGGGCCCTGAAATCTGACCCTCTGCCAAGAAATTATATTTTCCAAGATTGGG
AAAGGCACAGGAGGTGCGCATTTTAATTCGGCTCAAAAATAATGAAAATTAACCTTAAAAGTTGGCAACAATTAT
AAAAACAAATGCCACTTTCTTTGACAGAACTACAATAAACCAACAAAAAACTTGTCACAGGTCACGATACTCAGG
GCCCATGCATGACCCCTCGGCATTTCTGTACAGACCGAATCTGAAGGACTACGTCTATAAAGGAAGGGCTAACAA
CTGATTTCACCTACAGCTCTGCCCTATCAGTGTCTTCTCTCAAGAACTAATCTGTAGTCAGACTAAGTTCCTTTC
TGAGGAACTGCAAACTTTAAATGCTCTAATGTTTAGCTGTGGCAGAAGTAATCGGACATACCACAGAACACAGAG
GGGCAGGAAGTCAACTCACACTTTATCTGTAAAGCTAACGAGGGTTTCAGTGTGGTACATGTAAACCAGGAATCA
TAAGTTTCCAAGAAAACAAACAAAACAAAACAAAAAACCAATCAGCAGTTATGGTCAAGTGTATATTCCATCATT
CATATCTTTAAAAGACAGCAATAGTACTTAGGATAATTGTAAACATAAGGCCCTAAAAGAGTACATCTATTCTAG
GAAGAGTCATTCACTGTAACGATGCACCTGACATCAGGTACAGACTTCTACTGACAAGTGTAGTGTACCCTGTCC
TGCAGCAGGACTCGGGAGGAAGGATGTGCCCACACACTGCTGAGACACTGTAACAGCAGGTGTGACTGTGAAGAG
ACAGACACAGCAAACCACACGGTCAAAAGGTCATTAGAACATCACGTTCTTGTACACTAGTGTAGAAAGGTCTCC
CAAAGATGAAAGAGTGTAGGCCTGGCTTAATTTTCTCAGCTAGAGCCATTATTATGTTAAGATCGCCCTCTGCTG
TTAAATCAAGATCTATCTTCAGGTTCCGAAGAGACTTAAAGGGCTTTTTCCCCTTCTGCGTATCATCCTCGATGT
ACTTGATTAGTGTCAAGGCTTTTCTGTGAAGAATGAGGAGGAACTGTGCAAGGAAAGTACTCCTGAGAGACAGGC
CAGGCTTCAAATGGAAGACCTGATCCAGGAAGGCTTTCACTAGAGTGTCTCTGTGTAAGACATCTTGGAAAATAT
TCAAATCAGGAGTGAAGCTCTCATCTGTGTAGATGATGGTGTCCTGCGCCATGTCCTCTTCTGAAGTTGCCCTCC
AGAAGGCTGTCAGCTCTGACCTCATGTATCTGCGTTGATTATAAATATGTTCATGACACGGTGGCATCTGCTTGA
CAGTGTTGACATCCACATCAATGTGCGTGGTGGGGTACGGGGCATACATAACTTGCCGGAAGGGTAGGACAAAAC
TGCCTGTTGCATCCTTTAGCAAGCCTTGCACAAAGAGTCCCGATTCGTACTTAAAGGACGATTCTGCTTCACACA
GCCTGGAGCATTTCCTCTCTGCTGGTGTCAGAAAAAGGCACAGCGTTCTTACTATCTTATTTACTTTCTCTGCAC
TGCTGCCAACTACAACGGAACAGCCACAGGTCTGCAGGTGTGAGCTGATGGCATTGAGAAGAAAGCCTTCGTGAC
AGCTGTCACCAATGTCATCATCATTGAGCACTGTATCAGCTATATCAATGTCTTCAGGAACACTGTGGGATTTCA
TAGATGCAAGCAGCTCCATTACAGGAATGACTTCCCCAGTAAGCATGGGAATGATACTCTGACCCTGATCTTCCA
TCCTCTCTGTGCCTTCCAAGACAATTTTCTGGACATTTTCTTGTCTTTCCTTATGCATCCATATTCTTCCTTTTC
GAATAATGTGTGTTAGCCTGTCAACACACACTCTGTGAAGTGGGAGGTAGAAGCTCAGCTCTGTCTGCGGCAGTA
TAATTGATAGTCCATAAGTGCTCCGATCTCCATTCCAGTTTCCGTCGAAGATTAATGAAACAATAATTACCCCTT
TTTCAGATAAGACAAAAAATTTTACATCTATAGCCCCACTCTCTGCATTTCGAAGAATTTCTCCATTTAGAGTGT
GGTTGGCAAGAAAAGTTATTTCTCCATCACTGAGAAGCACTTGGTCTGTCTTTGGAGCCCAAATATGCCTTACTC
TAGGACCAAGAATATTATCCCAGTAAGCAAAGGTAGCCGCCAACAAGGGTGATTCACCACTTAAAGCAATCTCTG
TCTTGGCAACAGCAGGAGATGGTGGGGGGCAGATAGTCGACATCCCTGCATCCCAGGTCTCACTGCATTCCAGGT
CTCACATTATCCGAACGCTTGCAATAGCCACTCGCCGCTGCTGCGCCTTCACCGCCGGCGCAGGGACCGCAACCG
C
SEQ ID NO: 8
>Reverse Complement of SEQ ID NO: 4
TTTTTTTTTTTTTTTTTTTTTTTTGAATTTTAAAGGTATTTTATTCCAAATTCCCCATCTAGGAGAAAAGATGTA
TAACAGTGTTTACACATGCTTCAATAACTTATTCACTATACAACTTACATTCTCTAAAACAACAGAGTAAACCAG
CAGAGACAACACTTAGCACTTAAATAAGATTCTACTGTGGGAAGCAATGGTGTGGCACACTAGAAGGAGGGATCT
ACCCATTTACCATGATGGAGTGACTTGGAGTTCATAAGCCATCATGGACAGTGTGCGTTGTTCTGATGTGTCATG
TCAAAACCACTGTGACCTTTCAGAATAGAATGTTTTTTTCTGACTAAATCTGGTGGGTGAGGAAAGGGTTCCATT
TTTATCCCTTTTGTAAAAAATAAATATAGTCTCCCTTTTTATGCTAAGTCCACAGTTTTAAATAAAACACTTACT
TGTGTTTGTGTATACCCTACACTGCTGTAGCACGGAGCTTTACCAGTCAGTACTTCACAGCCAGCAAGGTACGAA
CGTTACAGGGACAGAGACGGACCGCTTGAGTTTGCCACAATAGCACCTAGAGAAATAGCACTGGGGTCAGAGTTC
TCCTGCTGTCCTTAGGATGCAGGGAACGTGGAGAACACCAAAGTCCAGGCAGAAATGAAAGGAAAGAGGCAAGAA
GCTCTCCTGCTCTGCAAAGAAGATTTTATCAGCGAATGTACTCTCTGGCATAGTTTACAAGAACTTCTAAGCCAG
GCCCATGGCGGACTGTGCAAAGGGAAGTCAGACGAAAGTGACTGGGCCCTGAAATCTGACCTTCTGCCAAGAAAT
TATATTTTCCAAGATTGGGAAAGGCACAGGAGGTGCACATTTTAATTTGGCTCAAAAATAATGAAAATTAACCTT
AAAACTTGGCAACAATTATAAAAACCAATGCCACTTTCTTTGACAGAAGTACAATAAACCAACAAAAAGCATACC
ACAGTTCACGATATTCAGTGCCCATGCATGATGGTTGGGCATGTCTATACAGACCACATCTAAAGGACTAAGTCT
ATAAAGGAAGATCCAACAACTGACTTCACCTAAAACTCCGCTTTCTCATGTCTTCTTTCAAAAACGAATCTGCAG
ACAGACTAAGTTGCTTTCTGTAGAACTGCAAACAAAGTGCTTTAGTTTTTAGTTGTTGCAAAAGTGATCCTACAC
GCCACAGATCGTACAGGCCAGAGAACACAGGGACAGGCAGTCAACTCACAGCTTACCTGTAAAAAGCTAACTAGG
GTTTCAGTGTGATGCATGTAAACCATGAATTATAAGTTTCAAAAAACAAAAACAACAAAACCAACCAGCAGTTGT
GGTGAAGTTTACATCCCTTCATTCGTATCCTTACAAGACAGCACTAGTACTTAGGAGGGTTGTAAACATAAGTCC
CTACGAGGGTACATCTAGTCTAGGAAAAGAGACATTCACTACAACGATGTACCTGACATCTGGTACAGACCTCTA
CTGACAAGTGTAGTGTAACGTGTCCTGCGGCAGGACCCTGGAGGAAGGATGTGTCCAAAGCGCTGAGACACTGTA
ACAGCAAGTGTGACTGTCATGAGACACACGGAGCAAACCACATGTTTAAAAAGTCATTAGAACATCACGTTCTTG
GACACTAGTGTAGAAAGGTCTCCCGAAGATGAAAGAGTGTAGGCCTGGCTTAATTTTCTCAGCTAGAGCCATTAT
TATGTTAAGGTCGCCCTCTGCTGTTAAATCAAGATCTATCTTCAGGTTCCGAAGAGACTTAAAGGGCTTTTTCCC
CTTCTGCGTGTCATCCTCTATGTACTTGATTAGTGTCAAGGCTTTTCTGTGAAGAATGAGGAGGAACTGTGCAAG
GAAAGTACTCCTGAGAGACAGGCCAGGCTTCAAATGGAAGACCTGATCCAGAAAGGCTTTCACTAGAGTGTCTCT
GTGTAAGACATCTTGGAAAATATTCAAATCAGGAGTGAAGCTCTCATCTGTGTAGATGATGGTGTCCTGAGCCAT
GTCCTCTTCTGAAGTTGCCCTCCAGAAGGCTGTCAGCTCTGACCTCATGTATCTGCGTTGATTATAAATATGTTC
ATGACACGGTGGCATCTGCTTGACAGTGTTGACATCCACATCGATGTGTGTGGTGGGATAAGGGGCATACATAAC
TTGCCGGAAAGGTAGTACAAAACTGCCAGTCGCATCCTTTAGCAAGCCTTGTACAAAGAGTCCAGATTCGTATTT
AAAGGACGATTCGGCTTCACACAGCCTGGAGCACTTCCTCTCTGCTGGTGTCAGAAAAAGGCACAGTGTTCTTAC
TATCTTATTTACTTTCTCTGCACTGCTGCCTACCACCACAGAACAGCCGCAGGTCTGCAGATGTGAGCTGATGGC
ATTGAGAAGAAAGCCTTCATGACAGCTGTCACCAATGTCATCATCATTGAGTACTGTATCAGCTATATCGAGGTC
TTCAGGAACACTGTGTGATCTCATAGACGCAAGCAGCTCCATCACAGGGATGACCTCCCCAGTAAGCATAGGGAT
GATACTCTGACCCTGATCTTCCATCCTCTCGGTGCCTTCCAAGACAATTTTCTGGACATTTTCTTGTCTTTCCTT
GTGCATCCATATCCTTCCTTTTCGAATGATGTGCGTTAGCCTGTCAACACACACTCTGTGCAGTGGGAGGTAGAA
ACTCAGCTCCGTCTGCGGCAGTATAATTGATAGTCCGTAAGTGCTCCGATCTCCGTTCCAGTTCCCGTCGAAGAT
TAATGAAACAATAATGACGCCCTTTTCAGATAAGACAAAAAACTTTACATCTATTGCCCCACTCTCCGCATTCCG
AAGAATTTCTCCATTCAGAGTGTGGTTGGCAAGAAAAGTGATTTCTCCATCACTGAGGAGTACTTGGTCTGTCTT
TGGAGCCCAAATGTGCCTTACTCTAGGACCAAGAATATTATCCCAGTAAGCAAAGGTAGCCGCCAACAAGGGTGA
TTCACCACTTAAAGCAATCTCTGTCTTGGCAACAGCAGGAGATGGTGGGGGGCAGATAGTCGACATCCCTGCATC
CCAGGTCTCACATTATCCAAACGCTTGCAATAGCCACTCGCCGCCGCTGCGCCTTCACCGCCGGCGCAGGGACCG
CAACCGCAGCCGGCTCCGGGCCCCGCCCCGGCCCCGCCCTCCCACGCCCCCGAGTCCGCCCCGTCGTAGCCCCGC
CCCCAACCACGGCCGCTCCAGATTCTGCAGGGGTCTGTGTCCGGTTCTTTTTAATCTGGTTTCCTTCTTTTGTCT
TTGGTCACCGTTATGGAGTCAAGTTGCGATCTGAGGCAACCAAAACGCACCTGCCTAGCATACCCTGCCTGGACT
GTCTAGACACCACTCCCACAGAGAAGGAACAGGCAATTGGGATGGCTGACACTACAAACG
SEQ ID NO: 9
>NM_145005.6 Homo sapiens C9orf72-SMCR8 complex subunit (C9orf72) ,
transcript variant 1, mRNA
ACGTAACCTACGGTGTCCCGCTAGGAAAGAGAGGTGCGTCAAACAGCGACAAGTTCCGCCCACGTAAAAG
ATGACGCTTGATATCTCCGGAGCATTTGGATAATGTGACAGTTGGAATGCAGTGATGTCGACTCTTTGCC
CACCGCCATCTCCAGCTGTTGCCAAGACAGAGATTGCTTTAAGTGGCAAATCACCTTTATTAGCAGCTAC
TTTTGCTTACTGGGACAATATTCTTGGTCCTAGAGTAAGGCACATTTGGGCTCCAAAGACAGAACAGGTA
CTTCTCAGTGATGGAGAAATAACTTTTCTTGCCAACCACACTCTAAATGGAGAAATCCTTCGAAATGCAG
AGAGTGGTGCTATAGATGTAAAGTTTTTTGTCTTGTCTGAAAAGGGAGTGATTATTGTTTCATTAATCTT
TGATGGAAACTGGAATGGGGATCGCAGCACATATGGACTATCAATTATACTTCCACAGACAGAACTTAGT
TTCTACCTCCCACTTCATAGAGTGTGTGTTGATAGATTAACACATATAATCCGGAAAGGAAGAATATGGA
TGCATAAGGAAAGACAAGAAAATGTCCAGAAGATTATCTTAGAAGGCACAGAGAGAATGGAAGATCAGGG
TCAGAGTATTATTCCAATGCTTACTGGAGAAGTGATTCCTGTAATGGAACTGCTTTCATCTATGAAATCA
CACAGTGTTCCTGAAGAAATAGATATAGCTGATACAGTACTCAATGATGATGATATTGGTGACAGCTGTC
ATGAAGGCTTTCTTCTCAAGTAAGAATTTTTCTTTTCATAAAAGCTGGATGAAGCAGATACCATCTTATG
CTCACCTATGACAAGATTTGGAAGAAAGAAAATAACAGACTGTCTACTTAGATTGTTCTAGGGACATTAC
GTATTTGAACTGTTGCTTAAATTTGTGTTATTTTTCACTCATTATATTTCTATATATATTTGGTGTTATT
CCATTTGCTATTTAAAGAAACCGAGTTTCCATCCCAGACAAGAAATCATGGCCCCTTGCTTGATTCTGGT
TTCTTGTTTTACTTCTCATTAAAGCTAACAGAATCCTTTCATATTAAGTTGTACTGTAGATGAACTTAAG
TTATTTAGGCGTAGAACAAAATTATTCATATTTATACTGATCTTTTTCCATCCAGCAGTGGAGTTTAGTA
CTTAAGAGTTTGTGCCCTTAAACCAGACTCCCTGGATTAATGCTGTGTACCCGTGGGCAAGGTGCCTGAA
TTCTCTATACACCTATTTCCTCATCTGTAAAATGGCAATAATAGTAATAGTACCTAATGTGTAGGGTTGT
TATAAGCATTGAGTAAGATAAATAATATAAAGCACTTAGAACAGTGCCTGGAACATAAAAACACTTAATA
ATAGCTCATAGCTAACATTTCCTATTTACATTTCTTCTAGAAATAGCCAGTATTTGTTGAGTGCCTACAT
GTTAGTTCCTTTACTAGTTGCTTTACATGTATTATCTTATATTCTGTTTTAAAGTTTCTTCACAGTTACA
GATTTTCATGAAATTTTACTTTTAATAAAAGAGAAGTAAAAGTATAAAGTATTCACTTTTATGTTCACAG
TCTTTTCCTTTAGGCTCATGATGGAGTATCAGAGGCATGAGTGTGTTTAACCTAAGAGCCTTAATGGCTT
GAATCAGAAGCACTTTAGTCCTGTATCTGTTCAGTGTCAGCCTTTCATACATCATTTTAAATCCCATTTG
ACTTTAAGTAAGTCACTTAATCTCTCTACATGTCAATTTCTTCAGCTATAAAATGATGGTATTTCAATAA
ATAAATACATTAATTAAATGATATTATACTGACTAATTGGGCTGTTTTAAGGCTCAATAAGAAAATTTCT
GTGAAAGGTCTCTAGAAAATGTAGGTTCCTATACAAATAAAAGATAACATTGTGCTTATAAAAAAAA
SEQ ID NO: 10
Severse Complement of SEQ ID NO: 9
TTTTTTTTATAAGCACAATGTTATCTTTTATTTGTATAGGAACCTACATTTTCTAGAGACCTTTCACAGAAATTT
TCTTATTGAGCCTTAAAACAGCCCAATTAGTCAGTATAATATCATTTAATTAATGTATTTATTTATTGAAATACC
ATCATTTTATAGCTGAAGAAATTGACATGTAGAGAGATTAAGTGACTTACTTAAAGTCAAATGGGATTTAAAATG
ATGTATGAAAGGCTGACACTGAACAGATACAGGACTAAAGTGCTTCTGATTCAAGCCATTAAGGCTCTTAGGTTA
AACACACTCATGCCTCTGATACTCCATCATGAGCCTAAAGGAAAAGACTGTGAACATAAAAGTGAATACTTTATA
CTTTTACTTCTCTTTTATTAAAAGTAAAATTTCATGAAAATCTGTAACTGTGAAGAAACTTTAAAACAGAATATA
AGATAATACATGTAAAGCAACTAGTAAAGGAACTAACATGTAGGCACTCAACAAATACTGGCTATTTCTAGAAGA
AATGTAAATAGGAAATGTTAGCTATGAGCTATTATTAAGTGTTTTTATGTTCCAGGCACTGTTCTAAGTGCTTTA
TATTATTTATCTTACTCAATGCTTATAACAACCCTACACATTAGGTACTATTACTATTATTGCCATTTTACAGAT
GAGGAAATAGGTGTATAGAGAATTCAGGCACCTTGCCCACGGGTACACAGCATTAATCCAGGGAGTCTGGTTTAA
GGGCACAAACTCTTAAGTACTAAACTCCACTGCTGGATGGAAAAAGATCAGTATAAATATGAATAATTTTGTTCT
ACGCCTAAATAACTTAAGTTCATCTACAGTACAACTTAATATGAAAGGATTCTGTTAGCTTTAATGAGAAGTAAA
ACAAGAAACCAGAATCAAGCAAGGGGCCATGATTTCTTGTCTGGGATGGAAACTCGGTTTCTTTAAATAGCAAAT
GGAATAACACCAAATATATATAGAAATATAATGAGTGAAAAATAACACAAATTTAAGCAACAGTTCAAATACGTA
ATGTCCCTAGAACAATCTAAGTAGACAGTCTGTTATTTTCTTTCTTCCAAATCTTGTCATAGGTGAGCATAAGAT
GGTATCTGCTTCATCCAGCTTTTATGAAAAGAAAAATTCTTACTTGAGAAGAAAGCCTTCATGACAGCTGTCACC
AATATCATCATCATTGAGTACTGTATCAGCTATATCTATTTCTTCAGGAACACTGTGTGATTTCATAGATGAAAG
CAGTTCCATTACAGGAATCACTTCTCCAGTAAGCATTGGAATAATACTCTGACCCTGATCTTCCATTCTCTCTGT
GCCTTCTAAGATAATCTTCTGGACATTTTCTTGTCTTTCCTTATGCATCCATATTCTTCCTTTCCGGATTATATG
TGTTAATCTATCAACACACACTCTATGAAGTGGGAGGTAGAAACTAAGTTCTGTCTGTGGAAGTATAATTGATAG
TCCATATGTGCTGCGATCCCCATTCCAGTTTCCATCAAAGATTAATGAAACAATAATCACTCCCTTTTCAGACAA
GACAAAAAACTTTACATCTATAGCACCACTCTCTGCATTTCGAAGGATTTCTCCATTTAGAGTGTGGTTGGCAAG
AAAAGTTATTTCTCCATCACTGAGAAGTACCTGTTCTGTCTTTGGAGCCCAAATGTGCCTTACTCTAGGACCAAG
AATATTGTCCCAGTAAGCAAAAGTAGCTGCTAATAAAGGTGATTTGCCACTTAAAGCAATCTCTGTCTTGGCAAC
AGCTGGAGATGGCGGTGGGCAAAGAGTCGACATCACTGCATTCCAACTGTCACATTATCCAAATGCTCCGGAGAT
ATCAAGCGTCATCTTTTACGTGGGCGGAACTTGTCGCTGTTTGACGCACCTCTCTTTCCTAGCGGGACACCGTAG
GTTACGT
SEQ ID NO: 11
>NM_018325.5 Homo sapiens C9orf72-SMCR8 complex subunit (C9orf72),
transcript variant 2, mRNA
GGTTGCGGTGCCTGCGCCCGCGGCGGCGGAGGCGCAGGCGGTGGCGAGTGGATATCTCCGGAGCATTTGG
ATAATGTGACAGTTGGAATGCAGTGATGTCGACTCTTTGCCCACCGCCATCTCCAGCTGTTGCCAAGACA
GAGATTGCTTTAAGTGGCAAATCACCTTTATTAGCAGCTACTTTTGCTTACTGGGACAATATTCTTGGTC
CTAGAGTAAGGCACATTTGGGCTCCAAAGACAGAACAGGTACTTCTCAGTGATGGAGAAATAACTTTTCT
TGCCAACCACACTCTAAATGGAGAAATCCTTCGAAATGCAGAGAGTGGTGCTATAGATGTAAAGTTTTTT
GTCTTGTCTGAAAAGGGAGTGATTATTGTTTCATTAATCTTTGATGGAAACTGGAATGGGGATCGCAGCA
CATATGGACTATCAATTATACTTCCACAGACAGAACTTAGTTTCTACCTCCCACTTCATAGAGTGTGTGT
TGATAGATTAACACATATAATCCGGAAAGGAAGAATATGGATGCATAAGGAAAGACAAGAAAATGTCCAG
AAGATTATCTTAGAAGGCACAGAGAGAATGGAAGATCAGGGTCAGAGTATTATTCCAATGCTTACTGGAG
AAGTGATTCCTGTAATGGAACTGCTTTCATCTATGAAATCACACAGTGTTCCTGAAGAAATAGATATAGC
TGATACAGTACTCAATGATGATGATATTGGTGACAGCTGTCATGAAGGCTTTCTTCTCAATGCCATCAGC
TCACACTTGCAAACCTGTGGCTGTTCCGTTGTAGTAGGTAGCAGTGCAGAGAAAGTAAATAAGATAGTCA
GAACATTATGCCTTTTTCTGACTCCAGCAGAGAGAAAATGCTCCAGGTTATGTGAAGCAGAATCATCATT
TAAATATGAGTCAGGGCTCTTTGTACAAGGCCTGCTAAAGGATTCAACTGGAAGCTTTGTGCTGCCTTTC
CGGCAAGTCATGTATGCTCCATATCCCACCACACACATAGATGTGGATGTCAATACTGTGAAGCAGATGC
CACCCTGTCATGAACATATTTATAATCAGCGTAGATACATGAGATCCGAGCTGACAGCCTTCTGGAGAGC
CACTTCAGAAGAAGACATGGCTCAGGATACGATCATCTACACTGACGAAAGCTTTACTCCTGATTTGAAT
ATTTTTCAAGATGTCTTACACAGAGACACTCTAGTGAAAGCCTTCCTGGATCAGGTCTTTCAGCTGAAAC
CTGGCTTATCTCTCAGAAGTACTTTCCTTGCACAGTTTCTACTTGTCCTTCACAGAAAAGCCTTGACACT
AATAAAATATATAGAAGACGATACGCAGAAGGGAAAAAAGCCCTTTAAATCTCTTCGGAACCTGAAGATA
GACCTTGATTTAACAGCAGAGGGCGATCTTAACATAATAATGGCTCTGGCTGAGAAAATTAAACCAGGCC
TACACTCTTTTATCTTTGGAAGACCTTTCTACACTAGTGTGCAAGAACGAGATGTTCTAATGACTTTTTA
AATGTGTAACTTAATAAGCCTATTCCATCACAATCATGATCGCTGGTAAAGTAGCTCAGTGGTGTGGGGA
AACGTTCCCCTGGATCATACTCCAGAATTCTGCTCTCAGCAATTGCAGTTAAGTAAGTTACACTACAGTT
CTCACAAGAGCCTGTGAGGGGATGTCAGGTGCATCATTACATTGGGTGTCTCTTTTCCTAGATTTATGCT
TTTGGGATACAGACCTATGTTTACAATATAATAAATATTATTGCTATCTTTTAAAGATATAATAATAGGA
TGTAAACTTGACCACAACTACTGTTTTTTTGAAATACATGATTCATGGTTTACATGTGTCAAGGTGAAAT
CTGAGTTGGCTTTTACAGATAGTTGACTTTCTATCTTTTGGCATTCTTTGGTGTGTAGAATTACTGTAAT
ACTTCTGCAATCAACTGAAAACTAGAGCCTTTAAATGATTTCAATTCCACAGAAAGAAAGTGAGCTTGAA
CATAGGATGAGCTTTAGAAAGAAAATTGATCAAGCAGATGTTTAATTGGAATTGATTATTAGATCCTACT
TTGTGGATTTAGTCCCTGGGATTCAGTCTGTAGAAATGTCTAATAGTTCTCTATAGTCCTTGTTCCTGGT
GAACCACAGTTAGGGTGTTTTGTTTATTTTATTGTTCTTGCTATTGTTGATATTCTATGTAGTTGAGCTC
TGTAAAAGGAAATTGTATTTTATGTTTTAGTAATTGTTGCCAACTTTTTAAATTAATTTTCATTATTTTT
GAGCCAAATTGAAATGTGCACCTCCTGTGCCTTTTTTCTCCTTAGAAAATCTAATTACTTGGAACAAGTT
CAGATTTCACTGGTCAGTCATTTTCATCTTGTTTTCTTCTTGCTAAGTCTTACCATGTACCTGCTTTGGC
AATCATTGCAACTCTGAGATTATAAAATGCCTTAGAGAATATACTAACTAATAAGATCTTTTTTTCAGAA
ACAGAAAATAGTTCCTTGAGTACTTCCTTCTTGCATTTCTGCCTATGTTTTTGAAGTTGTTGCTGTTTGC
CTGCAATAGGCTATAAGGAATAGCAGGAGAAATTTTACTGAAGTGCTGTTTTCCTAGGTGCTACTTTGGC
AGAGCTAAGTTATCTTTTGTTTTCTTAATGCGTTTGGACCATTTTGCTGGCTATAAAATAACTGATTAAT
ATAATTCTAACACAATGTTGACATTGTAGTTACACAAACACAAATAAATATTTTATTTAAAATTCTGGAA
GTAATATAAAAGGGAAAATATATTTATAAGAAAGGGATAAAGGTAATAGAGCCCTTCTGCCCCCCACCCA
CCAAATTTACACAACAAAATGACATGTTCGAATGTGAAAGGTCATAATAGCTTTCCCATCATGAATCAGA
AAGATGTGGACAGCTTGATGTTTTAGACAACCACTGAACTAGATGACTGTTGTACTGTAGCTCAGTCATT
TAAAAAATATATAAATACTACCTTGTAGTGTCCCATACTGTGTTTTTTACATGGTAGATTCTTATTTAAG
TGCTAACTGGTTATTTTCTTTGGCTGGTTTATTGTACTGTTATACAGAATGTAAGTTGTACAGTGAAATA
AGTTATTAAAGCATGTGTAAACATTGTTATATATCTTTTCTCCTAAATGGAGAATTTTGAATAAAATATA
TTTGAAATTTT
SEQ ID NO: 12
Reverse Complement of SEQ ID NO: 11
AAAATTTCAAATATATTTTATTCAAAATTCTCCATTTAGGAGAAAAGATATATAACAATGTTTACACATGCTTTA
ATAACTTATTTCACTGTACAACTTACATTCTGTATAACAGTACAATAAACCAGCCAAAGAAAATAACCAGTTAGC
ACTTAAATAAGAATCTACCATGTAAAAAACACAGTATGGGACACTACAAGGTAGTATTTATATATTTTTTAAATG
ACTGAGCTACAGTACAACAGTCATCTAGTTCAGTGGTTGTCTAAAACATCAAGCTGTCCACATCTTTCTGATTCA
TGATGGGAAAGCTATTATGACCTTTCACATTCGAACATGTCATTTTGTTGTGTAAATTTGGTGGGTGGGGGGCAG
AAGGGCTCTATTACCTTTATCCCTTTCTTATAAATATATTTTCCCTTTTATATTACTTCCAGAATTTTAAATAAA
ATATTTATTTGTGTTTGTGTAACTACAATGTCAACATTGTGTTAGAATTATATTAATCAGTTATTTTATAGCCAG
CAAAATGGTCCAAACGCATTAAGAAAACAAAAGATAACTTAGCTCTGCCAAAGTAGCACCTAGGAAAACAGCACT
TCAGTAAAATTTCTCCTGCTATTCCTTATAGCCTATTGCAGGCAAACAGCAACAACTTCAAAAACATAGGCAGAA
ATGCAAGAAGGAAGTACTCAAGGAACTATTTTCTGTTTCTGAAAAAAAGATCTTATTAGTTAGTATATTCTCTAA
GGCATTTTATAATCTCAGAGTTGCAATGATTGCCAAAGCAGGTACATGGTAAGACTTAGCAAGAAGAAAACAAGA
TGAAAATGACTGACCAGTGAAATCTGAACTTGTTCCAAGTAATTAGATTTTCTAAGGAGAAAAAAGGCACAGGAG
GTGCACATTTCAATTTGGCTCAAAAATAATGAAAATTAATTTAAAAAGTTGGCAACAATTACTAAAACATAAAAT
ACAATTTCCTTTTACAGAGCTCAACTACATAGAATATCAACAATAGCAAGAACAATAAAATAAACAAAACACCCT
AACTGTGGTTCACCAGGAACAAGGACTATAGAGAACTATTAGACATTTCTACAGACTGAATCCCAGGGACTAAAT
CCACAAAGTAGGATCTAATAATCAATTCCAATTAAACATCTGCTTGATCAATTTTCTTTCTAAAGCTCATCCTAT
GTTCAAGCTCACTTTCTTTCTGTGGAATTGAAATCATTTAAAGGCTCTAGTTTTCAGTTGATTGCAGAAGTATTA
CAGTAATTCTACACACCAAAGAATGCCAAAAGATAGAAAGTCAACTATCTGTAAAAGCCAACTCAGATTTCACCT
TGACACATGTAAACCATGAATCATGTATTTCAAAAAAACAGTAGTTGTGGTCAAGTTTACATCCTATTATTATAT
CTTTAAAAGATAGCAATAATATTTATTATATTGTAAACATAGGTCTGTATCCCAAAAGCATAAATCTAGGAAAAG
AGACACCCAATGTAATGATGCACCTGACATCCCCTCACAGGCTCTTGTGAGAACTGTAGTGTAACTTACTTAACT
GCAATTGCTGAGAGCAGAATTCTGGAGTATGATCCAGGGGAACGTTTCCCCACACCACTGAGCTACTTTACCAGC
GATCATGATTGTGATGGAATAGGCTTATTAAGTTACACATTTAAAAAGTCATTAGAACATCTCGTTCTTGCACAC
TAGTGTAGAAAGGTCTTCCAAAGATAAAAGAGTGTAGGCCTGGTTTAATTTTCTCAGCCAGAGCCATTATTATGT
TAAGATCGCCCTCTGCTGTTAAATCAAGGTCTATCTTCAGGTTCCGAAGAGATTTAAAGGGCTTTTTTCCCTTCT
GCGTATCGTCTTCTATATATTTTATTAGTGTCAAGGCTTTTCTGTGAAGGACAAGTAGAAACTGTGCAAGGAAAG
TACTTCTGAGAGATAAGCCAGGTTTCAGCTGAAAGACCTGATCCAGGAAGGCTTTCACTAGAGTGTCTCTGTGTA
AGACATCTTGAAAAATATTCAAATCAGGAGTAAAGCTTTCGTCAGTGTAGATGATCGTATCCTGAGCCATGTCTT
CTTCTGAAGTGGCTCTCCAGAAGGCTGTCAGCTCGGATCTCATGTATCTACGCTGATTATAAATATGTTCATGAC
AGGGTGGCATCTGCTTCACAGTATTGACATCCACATCTATGTGTGTGGTGGGATATGGAGCATACATGACTTGCC
GGAAAGGCAGCACAAAGCTTCCAGTTGAATCCTTTAGCAGGCCTTGTACAAAGAGCCCTGACTCATATTTAAATG
ATGATTCTGCTTCACATAACCTGGAGCATTTTCTCTCTGCTGGAGTCAGAAAAAGGCATAATGTTCTGACTATCT
TATTTACTTTCTCTGCACTGCTACCTACTACAACGGAACAGCCACAGGTTTGCAAGTGTGAGCTGATGGCATTGA
GAAGAAAGCCTTCATGACAGCTGTCACCAATATCATCATCATTGAGTACTGTATCAGCTATATCTATTTCTTCAG
GAACACTGTGTGATTTCATAGATGAAAGCAGTTCCATTACAGGAATCACTTCTCCAGTAAGCATTGGAATAATAC
TCTGACCCTGATCTTCCATTCTCTCTGTGCCTTCTAAGATAATCTTCTGGACATTTTCTTGTCTTTCCTTATGCA
TCCATATTCTTCCTTTCCGGATTATATGTGTTAATCTATCAACACACACTCTATGAAGTGGGAGGTAGAAACTAA
GTTCTGTCTGTGGAAGTATAATTGATAGTCCATATGTGCTGCGATCCCCATTCCAGTTTCCATCAAAGATTAATG
AAACAATAATCACTCCCTTTTCAGACAAGACAAAAAACTTTACATCTATAGCACCACTCTCTGCATTTCGAAGGA
TTTCTCCATTTAGAGTGTGGTTGGCAAGAAAAGTTATTTCTCCATCACTGAGAAGTACCTGTTCTGTCTTTGGAG
CCCAAATGTGCCTTACTCTAGGACCAAGAATATTGTCCCAGTAAGCAAAAGTAGCTGCTAATAAAGGTGATTTGC
CACTTAAAGCAATCTCTGTCTTGGCAACAGCTGGAGATGGCGGTGGGCAAAGAGTCGACATCACTGCATTCCAAC
TGTCACATTATCCAAATGCTCCGGAGATATCCACTCGCCACCGCCTGCGCCTCCGCCGCCGCGGGCGCAGGCACC
GCAACC
SEQ ID NO: 13
>NC_000009.12: c27573866-27546546 Homo sapiens chromosome 9, GRCh38.p13
Primary Assembly; portion of human chromosome 9 harboring the C9orf72 gene
(nucleotides 27546546 . . . 27573866 of the assembly of chromosome 9)
ACGTAACCTACGGTGTCCCGCTAGGAAAGAGAGGTGCGTCAAACAGCGACAAGTTCCGCCCACGTAAAAGATGAC
GCTTGGTGTGTCAGCCGTCCCTGCTGCCCGGTTGCTTCTCTTTTGGGGGCGGGGTCTAGCAAGAGCAGGTGTGGG
TTTAGGAGGTGTGTGTTTTTGTTTTTCCCACCCTCTCTCCCCACTACTTGCTCTCACAGTACTCGCTGAGGGTGA
ACAAGAAAAGACCTGATAAAGATTAACCAGAAGAAAACAAGGAGGGAAACAACCGCAGCCTGTAGCAAGCTCTGG
AACTCAGGAGTCGCGCGCTAGGGGCCGGGGCCGGGGCCGGGGCGTGGTCGGGGGGGGCCCGGGGGCGGGCCCGGG
GCGGGGCTGCGGTTGCGGTGCCTGCGCCCGCGGCGGCGGAGGCGCAGGCGGTGGCGAGTGGGTGAGTGAGGAGGC
GGCATCCTGGCGGGTGGCTGTTTGGGGTTCGGCTGCCGGGAAGAGGCGCGGGTAGAAGCGGGGGCTCTCCTCAGA
GCTCGACGCATTTTTACTTTCCCTCTCATTTCTCTGACCGAAGCTGGGTGTCGGGCTTTCGCCTCTAGCGACTGG
TGGAATTGCCTGCATCCGGGCCCCGGGCTTCCCGGCGGCGGCGGCGGCGGCGGCGGCGCAGGGACAAGGGATGGG
GATCTGGCCTCTTCCTTGCTTTCCCGCCCTCAGTACCCGAGCTGTCTCCTTCCCGGGGACCCGCTGGGAGCGCTG
CCGCTGCGGGCTCGAGAAAAGGGAGCCTCGGGTACTGAGAGGCCTCGCCTGGGGGAAGGCCGGAGGGTGGGCGGC
GCGCGGCTTCTGCGGACCAAGTCGGGGTTCGCTAGGAACCCGAGACGGTCCCTGCCGGCGAGGAGATCATGCGGG
ATGAGATGGGGGTGTGGAGACGCCTGCACAATTTCAGCCCAAGCTTCTAGAGAGTGGTGATGACTTGCATATGAG
GGCAGCAATGCAAGTCGGTGTGCTCCCCATTCTGTGGGACATGACCTGGTTGCTTCACAGCTCCGAGATGACACA
GACTTGCTTAAAGGAAGTGACTATTGTGACTTGGGCATCACTTGACTGATGGTAATCAGTTGTCTAAAGAAGTGC
ACAGATTACATGTCCGTGTGCTCATTGGGTCTATCTGGCCGCGTTGAACACCACCAGGCTTTGTATTCAGAAACA
GGAGGGAGGTCCTGCACTTTCCCAGGAGGGGTGGCCCTTTCAGATGCAATCGAGATTGTTAGGCTCTGGGAGAGT
AGTTGCCTGGTTGTGGCAGTTGGTAAATTTCTATTCAAACAGTTGCCATGCACCAGTTGTTCACAACAAGGGTAC
GTAATCTGTCTGGCATTACTTCTACTTTTGTACAAAGGATCAAAAAAAAAAAAGATACTGTTAAGATATGATTTT
TCTCAGACTTTGGGAAACTTTTAACATAATCTGTGAATATCACAGAAACAAGACTATCATATAGGGGATATTAAT
AACCTGGAGTCAGAATACTTGAAATACGGTGTCATTTGACACGGGCATTGTTGTCACCACCTCTGCCAAGGCCTG
CCACTTTAGGAAAACCCTGAATCAGTTGGAAACTGCTACATGCTGATAGTACATCTGAAACAAGAACGAGAGTAA
TTACCACATTCCAGATTGTTCACTAAGCCAGCATTTACCTGCTCCAGGAAAAAATTACAAGCACCTTATGAAGTT
GATAAAATATTTTGTTTGGCTATGTTGGCACTCCACAATTTGCTTTCAGAGAAACAAAGTAAACCAAGGAGGACT
TCTGTTTTTCAAGTCTGCCCTCGGGTTCTATTCTACGTTAATTAGATAGTTCCCAGGAGGACTAGGTTAGCCTAC
CTATTGTCTGAGAAACTTGGAACTGTGAGAAATGGCCAGATAGTGATATGAACTTCACCTTCCAGTCTTCCCTGA
TGTTGAAGATTGAGAAAGTGTTGTGAACTTTCTGGTACTGTAAACAGTTCACTGTCCTTGAAGTGGTCCTGGGCA
GCTCCTGTTGTGGAAAGTGGACGGTTTAGGATCCTGCTTCTCTTTGGGCTGGGAGAAAATAAACAGCATGGTTAC
AAGTATTGAGAGCCAGGTTGGAGAAGGTGGCTTACACCTGTAATGCCAGAGCTTTGGGAGGCGGAGGCAAGAGGA
TCACTTGAAGCCAGGAGTTCAAGCTCAACCTGGGCAACGTAGACCCTGTCTCTACAAAAAATTAAAAACTTAGCC
GGGCGTGGTGATGTGCACCTGTAGTCCTAGCTACTTGGGAGGCTGAGGCAGGAGGGTCATTTGAGCCCAAGAGTT
TGAAGTTACCGAGAGCTATGATCCTGCCAGTGCATTCCAGCCTGGATGACAAAACGAGACCCTGTCTCTAAAAAA
CAAGAAGTGAGGGCTTTATGATTGTAGAATTTTCACTACAATAGCAGTGGACCAACCACCTTTCTAAATACCAAT
CAGGGAAGAGATGGTTGATTTTTTAACAGACGTTTAAAGAAAAAGCAAAACCTCAAACTTAGCACTCTACTAACA
GTTTTAGCAGATGTTAATTAATGTAATCATGTCTGCATGTATGGGATTATTTCCAGAAAGTGTATTGGGAAACCT
CTCATGAACCCTGTGAGCAAGCCACCGTCTCACTCAATTTGAATCTTGGCTTCCCTCAAAAGACTGGCTAATGTT
TGGTAACTCTCTGGAGTAGACAGCACTACATGTACGTAAGATAGGTACATAAACAACTATTGGTTTTGAGCTGAT
TTTTTTCAGCTGCATTTGCATGTATGGATTTTTCTCACCAAAGACGATGACTTCAAGTATTAGTAAAATAATTGT
ACAGCTCTCCTGATTATACTTCTCTGTGACATTTCATTTCCCAGGCTATTTCTTTTGGTAGGATTTAAAACTAAG
CAATTCAGTATGATCTTTGTCCTTCATTTTCTTTCTTATTCTTTTTGTTTGTTTGTTTGTTTGTTTTTTTCTTGA
GGCAGAGTCTCTCTCTGTCGCCCAGGCTGGAGTGCAGTGGCGCCATCTCAGCTCATTGCAACCTCTGCCACCTCC
GGGTTCAAGAGATTCTCCTGCCTCAGCCTCCCGAGTAGCTGGGATTACAGGTGTCCACCACCACACCCGGCTAAT
TTTTTGTATTTTTAGTAGAGGTGGGGTTTCACCATGTTGGCCAGGCTGGTCTTGAGCTCCTGACCTCAGGTGATC
CACCTGCCTCGGCCTACCAAAGAGCTGGGATAACAGGTGTGACCCACCATGCCCGGCCCATTTTTTTTTTCTTAT
TCTGTTAGGAGTGAGAGTGTAACTAGCAGTATAATAGTTCAATTTTCACAACGTGGTAAAAGTTTCCCTATAATT
CAATCAGATTTTGCTCCAGGGTTCAGTTCTGTTTTAGGAAATACTTTTATTTTCAGTTTAATGATGAAATATTAG
AGTTGTAATATTGCCTTTATGATTATCCACCTTTTTAACCTAAAAGAATGAAAGAAAAATATGTTTGCAATATAA
TTTTATGGTTGTATGTTAACTTAATTCATTATGTTGGCCTCCAGTTTGCTGTTGTTAGTTATGACAGCAGTAGTG
TCATTACCATTTCAATTCAGATTACATTCCTATATTTGATCATTGTAAACTGACTGCTTACATTGTATTAAAAAC
AGTGGATATTTTAAAGAAGCTGTACGGCTTATATCTAGTGCTGTCTCTTAAGACTATTAAATTGATACAACATAT
TTAAAAGTAAATATTACCTAAATGAATTTTTGAAATTACAAATACACGTGTTAAAACTGTCGTTGTGTTCAACCA
TTTCTGTACATACTTAGAGTTAACTGTTTTGCCAGGCTCTGTATGCCTACTCATAATATGATAAAAGCACTCATC
TAATGCTCTGTAAATAGAAGTCAGTGCTTTCCATCAGACTGAACTCTCTTGACAAGATGTGGATGAAATTCTTTA
AGTAAAATTGTTTACTTTGTCATACATTTACAGATCAAATGTTAGCTCCCAAAGCAATCATATGGCAAAGATAGG
TATATCATAGTTTGCCTATTAGCTGCTTTGTATTGCTATTATTATAAATAGACTTCACAGTTTTAGACTTGCTTA
GGTGAAATTGCAATTCTTTTTACTTTCAGTCTTAGATAACAAGTCTTCAATTATAGTACAATCACACATTGCTTA
GGAATGCATCATTAGGCGATTTTGTCATTATGCAAACATCATAGAGTGTACTTACACAAACCTAGATAGTATAGC
CTTTATGTACCTAGGCCGTATGGTATAGTCTGTTGCTCCTAGGCCACAAACCTGTACAACTGTTACTGTACTGAA
TACTATAGACAGTTGTAACACAGTGGTAAATATTTATCTAAATATATGCAAACAGAGAAAAGGTACAGTAAAAGT
ATGGTATAAAAGATAATGGTATACCTGTGTAGGCCACTTACCACGAATGGAGCTTGCAGGACTAGAAGTTGCTCT
GGGTGAGTCAGTGAGTGAGTGGTGAATTAATGTGAAGGCCTAGAACACTGTACACCACTGTAGACTATAAACACA
GTACGCTGAAGCTACACCAAATTTATCTTAACAGTTTTTCTTCAATAAAAAATTATAACTTTTTAACTTTGTAAA
CTTTTTAATTTTTTAACTTTTAAAATACTTAGCTTGAAACACAAATACATTGTATAGCTATACAAAAATATTTTT
TCTTTGTATCCTTATTCTAGAAGCTTTTTTCTATTTTCTATTTTAAATTTTTTTTTTTACTTGTTAGTCGTTTTT
GTTAAAAACTAAAACACACACACTTTCACCTAGGCATAGACAGGATTAGGATCATCAGTATCACTCCCTTCCACC
TCACTGCCTTCCACCTCCACATCTTGTCCCACTGGAAGGTTTTTAGGGGCAATAACACACATGTAGCTGTCACCT
ATGATAACAGTGCTTTCTGTTGAATACCTCCTGAAGGACTTGCCTGAGGCTGTTTTACATTTAACTTAAAAAAAA
AAAAAGTAGAAGGAGTGCACTCTAAAATAACAATAAAAGGCATAGTATAGTGAATACATAAACCAGCAATGTAGT
AGTTTATTATCAAGTGTTGTACACTGTAATAATTGTATGTGCTATACTTTAAATAACTTGCAAAATAGTACTAAG
ACCTTATGATGGTTACAGTGTCACTAAGGCAATAGCATATTTTCAGGTCCATTGTAATCTAATGGGACTACCATC
ATATATGCAGTCTACCATTGACTGAAACGTTACATGGCACATAACTGTATTTGCAAGAATGATTTGTTTTACATT
AATATCACATAGGATGTACCTTTTTAGAGTGGTATGTTTATGTGGATTAAGATGTACAAGTTGAGCAAGGGGACC
AAGAGCCCTGGGTTCTGTCTTGGATGTGAGCGTTTATGTTCTTCTCCTCATGTCTGTTTTCTCATTAAATTCAAA
GGCTTGAACGGGCCCTATTTAGCCCTTCTGTTTTCTACGTGTTCTAAATAACTAAAGCTTTTAAATTCTAGCCAT
TTAGTGTAGAACTCTCTTTGCAGTGATGAAATGCTGTATTGGTTTCTTGGCTAGCATATTAAATATTTTTATCTT
TGTCTTGATACTTCAATGTCGTTTTAAACATCAGGATCGGGCTTCAGTATTCTCATAACCAGAGAGTTCACTGAG
GATACAGGACTGTTTGCCCATTTTTTGTTATGGCTCCAGACTTGTGGTATTTCCATGTCTTTTTTTTTTTTTTTT
TTTTTGACCTTTTAGCGGCTTTAAAGTATTTCTGTTGTTAGGTGTTGTATTACTTTTCTAAGATTACTTAACAAA
GCACCACAAACTGAGTGGCTTTAAACAACAGCAATTTATTCTCTCACAATTCTAGAAGCTAGAAGTCCGAAATCA
AAGTGTTGACAGGGGCATGATCTTCAAGAGAGAAGACTCTTTCCTTGCCTCTTCCTGGCTTCTGGTGGTTACCAG
CAATCCTGAGTGTTCCTTTCTTGCCTTGTAGTTTCAACAATCCAGTATCTGCCTTTTGTCTTCACATGGCTGTCT
ACCATTTGTCTCTGTGTCTCCAAATCTCTCTCCTTATAAACACAGCAGTTATTGGATTAGGCCCCACTCTAATCC
AGTATGACCCCATTTTAACATGATTACACTTATTTCTAGATAAGGTCACATTCACGTACACCAAGGGTTAGGAAT
TGAACATATCTTTTTGGGGGACACAATTCAACCCACAAGTGTCAGTCTCTAGCTGAGCCTTTCCCTTCCTGTTTT
TCTCCTTTTTAGTTGCTATGGGTTAGGGGCCAAATCTCCAGTCATACTAGAATTGCACATGGACTGGATATTTGG
GAATACTGCGGGTCTATTCTATGAGCTTTAGTATGTAACATTTAATATCAGTGTAAAGAAGCCCTTTTTTAAGTT
ATTTCTTTGAATTTCTAAATGTATGCCCTGAATATAAGTAACAAGTTACCATGTCTTGTAAAATGATCATATCAA
CAAACATTTAATGTGCACCTACTGTGCTAGTTGAATGTCTTTATCCTGATAGGAGATAACAGGATTCCACATCTT
TGACTTAAGAGGACAAACCAAATATGTCTAAATCATTTGGGGTTTTGATGGATATCTTTAAATTGCTGAACCTAA
TCATTGGTTTCATATGTCATTGTTTAGATATCTCCGGAGCATTTGGATAATGTGACAGTTGGAATGCAGTGATGT
CGACTCTTTGCCCACCGCCATCTCCAGCTGTTGCCAAGACAGAGATTGCTTTAAGTGGCAAATCACCTTTATTAG
CAGCTACTTTTGCTTACTGGGACAATATTCTTGGTCCTAGAGTAAGGCACATTTGGGCTCCAAAGACAGAACAGG
TACTTCTCAGTGATGGAGAAATAACTTTTCTTGCCAACCACACTCTAAATGGAGAAATCCTTCGAAATGCAGAGA
GTGGTGCTATAGATGTAAAGTTTTTTGTCTTGTCTGAAAAGGGAGTGATTATTGTTTCATTAATCTTTGATGGAA
ACTGGAATGGGGATCGCAGCACATATGGACTATCAATTATACTTCCACAGACAGAACTTAGTTTCTACCTCCCAC
TTCATAGAGTGTGTGTTGATAGATTAACACATATAATCCGGAAAGGAAGAATATGGATGCATAAGGTAAGTGATT
TTTCAGCTTATTAATCATGTTAACCTATCTGTTGAAAGCTTATTTTCTGGTACATATAAATCTTATTTTTTTAAT
TATATGCAGTGAACATCAAACAATAAATGTTATTTATTTTGCATTTACCCTATTAGATACAAATACATCTGGTCT
GATACCTGTCATCTTCATATTAACTGTGGAAGGTACGAAATGGTAGCTCCACATTATAGATGAAAAGCTAAAGCT
TAGACAAATAAAGAAACTTTTAGACCCTGGATTCTTCTTGGGAGCCTTTGACTCTAATACCTTTTGTTTCCCTTT
CATTGCACAATTCTGTCTTTTGCTTACTACTATGTGTAAGTATAACAGTTCAAAGTAATAGTTTCATAAGCTGTT
GGTCATGTAGCCTTTGGTCTCTTTAACCTCTTTGCCAAGTTCCCAGGTTCATAAAATGAGGAGGTTGAATGGAAT
GGTTCCCAAGAGAATTCCTTTTAATCTTACAGAAATTATTGTTTTCCTAAATCCTGTAGTTGAATATATAATGCT
ATTTACATTTCAGTATAGTTTTGATGTATCTAAAGAACACATTGAATTCTCCTTCCTGTGTTCCAGTTTGATACT
AACCTGAAAGTCCATTAAGCATTACCAGTTTTAAAAGGCTTTTGCCCAATAGTAAGGAAAAATAATATCTTTTAA
AAGAATAATTTTTTACTATGTTTGCAGGCTTACTTCCTTTTTTCTCACATTATGAAACTCTTAAAATCAGGAGAA
TCTTTTAAACAACATCATAATGTTTAATTTGAAAAGTGCAAGTCATTCTTTTCCTTTTTGAAACTATGCAGATGT
TACATTGACTGTTTTCTGTGAAGTTATCTTTTTTTCACTGCAGAATAAAGGTTGTTTTGATTTTATTTTGTATTG
TTTATGAGAACATGCATTTGTTGGGTTAATTTCCTACCCCTGCCCCCATTTTTTCCCTAAAGTAGAAAGTATTTT
TCTTGTGAACTAAATTACTACACAAGAACATGTCTATTGAAAAATAAGCAAGTATCAAAATGTTGTGGGTTGTTT
TTTTAAATAAATTTTCTCTTGCTCAGGAAAGACAAGAAAATGTCCAGAAGATTATCTTAGAAGGCACAGAGAGAA
TGGAAGATCAGGTATATGCAAATTGCATACTGTCAAATGTTTTTCTCACAGCATGTATCTGTATAAGGTTGATGG
CTACATTTGTCAAGGCCTTGGAGACATACGAATAAGCCTTTAATGGAGCTTTTATGGAGGTGTACAGAATAAACT
GGAGGAAGATTTCCATATCTTAAACCCAAAGAGTTAAATCAGTAAACAAAGGAAAATAGTAATTGCATCTACAAA
TTAATATTTGCTCCCTTTTTTTTTCTGTTTGCCCAGAATAAATTTTGGATAACTTGTTCATAGTAAAAATAAAAA
AAATTGTCTCTGATATGTTCTTTAAGGTACTACTTCTCGAACCTTTCCCTAGAAGTAGCTGTAACAGAAGGAGAG
CATATGTACCCCTGAGGTATCTGTCTGGGGTGTAGGCCCAGGTCCACACAATATTTCTTCTAAGTCTTATGTTGT
ATCGTTAAGACTCATGCAATTTACATTTTATTCCATAACTATTTTAGTATTAAAATTTGTCAGTGATATTTCTTA
CCCTCTCCTCTAGGAAAATGTGCCATGTTTATCCCTTGGCTTTGAATGCCCCTCAGGAACAGACACTAAGAGTTT
GAGAAGCATGGTTACAAGGGTGTGGCTTCCCCTGCGGAAACTAAGTACAGACTATTTCACTGTAAAGCAGAGAAG
TTCTTTTGAAGGAGAATCTCCAGTGAAGAAAGAGTTCTTCACTTTTACTTCCATTTCCTCTTGTGGGTGACCCTC
AATGCTCCTTGTAAAACTCCAATATTTTAAACATGGCTGTTTTGCCTTTCTTTGCTTCTTTTTAGCATGAATGAG
ACAGATGATACTTTAAAAAAGTAATTAAAAAAAAAAACTTGTGAAAATACATGGCCATAATACAGAACCCAATAC
AATGATCTCCTTTACCAAATTGTTATGTTTGTACTTTTGTAGATAGCTTTCCAATTCAGAGACAGTTATTCTGTG
TAAAGGTCTGACTTAACAAGAAAAGATTTCCCTTTACCCAAAGAATCCCAGTCCTTATTTGCTGGTCAATAAGCA
GGGTCCCCAGGAATGGGGTAACTTTCAGCACCCTCTAACCCACTAGTTATTAGTAGACTAATTAAGTAAACTTAT
CGCAAGTTGAGGAAACTTAGAACCAACTAAAATTCTGCTTTTACTGGGATTTTGTTTTTTCAAACCAGAAACCTT
TACTTAAGTTGACTACTATTAATGAATTTTGGTCTCTCTTTTAAGTGCTCTTCTTAAAAATGTTATCTTACTGCT
GAGAAGTTCAAGTTTGGGAAGTACAAGGAGGAATAGAAACTTAAGAGATTTTCTTTTAGAGCCTCTTCTGTATTT
AGCCCTGTAGGATTTTTTTTTTTTTTTTTTTTTTTGGTGTTGTTGAGCTTCAGTGAGGCTATTCATTCACTTATA
CTGATAATGTCTGAGATACTGTGAATGAAATACTATGTATGCTTAAACCTAAGAGGAAATATTTTCCCAAAATTA
TTCTTCCCGAAAAGGAGGAGTTGCCTTTTGATTGAGTTCTTGCAAATCTCACAACGACTTTATTTTGAACAATAC
TGTTTGGGGATGATGCATTAGTTTGAAACAACTTCAGTTGTAGCTGTCATCTGATAAAATTGCTTCACAGGGAAG
GAAATTTAACACGGATCTAGTCATTATTCTTGTTAGATTGAATGTGTGAATTGTAATTGTAAACAGGCATGATAA
TTATTACTTTAAAAACTAAAAACAGTGAATAGTTAGTTGTGGAGGTTACTAAAGGATGGTTTTTTTTTAAATAAA
ACTTTCAGCATTATGCAAATGGGCATATGGCTTAGGATAAAACTTCCAGAAGTAGCATCACATTTAAATTCTCAA
GCAACTTAATAATATGGGGCTCTGAAAAACTGGTTAAGGTTACTCCAAAAATGGCCCTGGGTCTGACAAAGATTC
TAACTTAAAGATGCTTATGAAGACTTTGAGTAAAATCATTTCATAAAATAAGTGAGGAAAAACAACTAGTATTAA
ATTCATCTTAAATAATGTATGATTTAAAAAATATGTTTAGCTAAAAATGCATAGTCATTTGACAATTTCATTTAT
ATCTCAAAAAATTTACTTAACCAAGTTGGTCACAAAACTGATGAGACTGGTGGTGGTAGTGAATAAATGAGGGAC
CATCCATATTTGAGACACTTTACATTTGTGATGTGTTATACTGAATTTTCAGTTTGATTCTATAGACTACAAATT
TCAAAATTACAATTTCAAGATGTAATAAGTAGTAATATCTTGAAATAGCTCTAAAGGGAATTTTTCTGTTTTATT
GATTCTTAAAATATATGTGCTGATTTTGATTTGCATTTGGGTAGATTATACTTTTATGAGTATGGAGGTTAGGTA
TTGATTCAAGTTTTCCTTACCTATTTGGTAAGGATTTCAAAGTCTTTTTGTGCTTGGTTTTCCTCATTTTTAAAT
ATGAAATATATTGATGACCTTTAACAAATTTTTTTTATCTCAAATTTTAAAGGAGATCTTTTCTAAAAGAGGCAT
GATGACTTAATCATTGCATGTAACAGTAAACGATAAACCAATGATTCCATACTCTCTAAAGAATAAAAGTGAGCT
TTAGGGCCGGGCATGGTCAGAAATTTGACACCAACCTGGCCAACATGGCGAAACCCCGTCTCTACTAAAAATACA
AAAATCAGCCGGGCATGGTGGCGGCACCTATAGTCCCAGCTACTTGGGAGGATGAGACAGGAGAGTCACTTGAAC
CTGGGAGGAGAGGTTGCAGTGAGCTGAGATCACGCCATTGCACTCCAGCCTGAGCAATGAAAGCAAAACTCCATC
TCAAAAAAAAAAAAAGAAAAGAAAGAATAAAAGTGAGCTTTGGATTGCATATAAATCCTTTAGACATGTAGTAGA
CTTGTTTGATACTGTGTTTGAACAAATTACGAAGTATTTTCATCAAAGAATGTTATTGTTTGATGTTATTTTTAT
TTTTTATTGCCCAGCTTCTCTCATATTACGTGATTTTCTTCACTTCATGTCACTTTATTGTGCAGGGTCAGAGTA
TTATTCCAATGCTTACTGGAGAAGTGATTCCTGTAATGGAACTGCTTTCATCTATGAAATCACACAGTGTTCCTG
AAGAAATAGATGTAAGTTTAAATGAGAGCAATTATACACTTTATGAGTTTTTTGGGGTTATAGTATTATTATGTA
TATTATTAATATTCTAATTTTAATAGTAAGGACTTTGTCATACATACTATTCACATACAGTATTAGCCACTTTAG
CAAATAAGCACACACAAAATCCTGGATTTTATGGCAAAACAGAGGCATTTTTGATCAGTGATGACAAAATTAAAT
TCATTTTGTTTATTTCATTACTTTTATAATTCCTAAAAGTGGGAGGATCCCAGCTCTTATAGGAGCAATTAATAT
TTAATGTAGTGTCTTTTGAAACAAAACTGTGTGCCAAAGTAGTAACCATTAATGGAAGTTTACTTGTAGTCACAA
ATTTAGTTTCCTTAATCATTTGTTGAGGACGTTTTGAATCACACACTATGAGTGTTAAGAGATACCTTTAGGAAA
CTATTCTTGTTGTTTTCTGATTTTGTCATTTAGGTTAGTCTCCTGATTCTGACAGCTCAGAAGAGGAAGTTGTTC
TTGTAAAAATTGTTTAACCTGCTTGACCAGCTTTCACATTTGTTCTTCTGAAGTTTATGGTAGTGCACAGAGATT
GTTTTTTGGGGAGTCTTGATTCTCGGAAATGAAGGCAGTGTGTTATATTGAATCCAGACTTCCGAAAACTTGTAT
ATTAAAAGTGTTATTTCAACACTATGTTACAGCCAGACTAATTTTTTTATTTTTTGATGCATTTTAGATAGCTGA
TACAGTACTCAATGATGATGATATTGGTGACAGCTGTCATGAAGGCTTTCTTCTCAAGTAAGAATTTTTCTTTTC
ATAAAAGCTGGATGAAGCAGATACCATCTTATGCTCACCTATGACAAGATTTGGAAGAAAGAAAATAACAGACTG
TCTACTTAGATTGTTCTAGGGACATTACGTATTTGAACTGTTGCTTAAATTTGTGTTATTTTTCACTCATTATAT
TTCTATATATATTTGGTGTTATTCCATTTGCTATTTAAAGAAACCGAGTTTCCATCCCAGACAAGAAATCATGGC
CCCTTGCTTGATTCTGGTTTCTTGTTTTACTTCTCATTAAAGCTAACAGAATCCTTTCATATTAAGTTGTACTGT
AGATGAACTTAAGTTATTTAGGCGTAGAACAAAATTATTCATATTTATACTGATCTTTTTCCATCCAGCAGTGGA
GTTTAGTACTTAAGAGTTTGTGCCCTTAAACCAGACTCCCTGGATTAATGCTGTGTACCCGTGGGCAAGGTGCCT
GAATTCTCTATACACCTATTTCCTCATCTGTAAAATGGCAATAATAGTAATAGTACCTAATGTGTAGGGTTGTTA
TAAGCATTGAGTAAGATAAATAATATAAAGCACTTAGAACAGTGCCTGGAACATAAAAACACTTAATAATAGCTC
ATAGCTAACATTTCCTATTTACATTTCTTCTAGAAATAGCCAGTATTTGTTGAGTGCCTACATGTTAGTTCCTTT
ACTAGTTGCTTTACATGTATTATCTTATATTCTGTTTTAAAGTTTCTTCACAGTTACAGATTTTCATGAAATTTT
ACTTTTAATAAAAGAGAAGTAAAAGTATAAAGTATTCACTTTTATGTTCACAGTCTTTTCCTTTAGGCTCATGAT
GGAGTATCAGAGGCATGAGTGTGTTTAACCTAAGAGCCTTAATGGCTTGAATCAGAAGCACTTTAGTCCTGTATC
TGTTCAGTGTCAGCCTTTCATACATCATTTTAAATCCCATTTGACTTTAAGTAAGTCACTTAATCTCTCTACATG
TCAATTTCTTCAGCTATAAAATGATGGTATTTCAATAAATAAATACATTAATTAAATGATATTATACTGACTAAT
TGGGCTGTTTTAAGGCTCAATAAGAAAATTTCTGTGAAAGGTCTCTAGAAAATGTAGGTTCCTATACAAATAAAA
GATAACATTGTGCTTATAGCTTCGGTGTTTATCATATAAAGCTATTCTGAGTTATTTGAAGAGCTCACCTACTTT
TTTTTGTTTTTAGTTTGTTAAATTGTTTTATAGGCAATGTTTTTAATCTGTTTTCTTTAACTTACAGTGCCATCA
GCTCACACTTGCAAACCTGTGGCTGTTCCGTTGTAGTAGGTAGCAGTGCAGAGAAAGTAAATAAGGTAGTTTATT
TTATAATCTAGCAAATGATTTGACTCTTTAAGACTGATGATATATCATGGATTGTCATTTAAATGGTAGGTTGCA
ATTAAAATGATCTAGTAGTATAAGGAGGCAATGTAATCTCATCAAATTGCTAAGACACCTTGTGGCAACAGTGAG
TTTGAAATAAACTGAGTAAGAATCATTTATCAGTTTATTTTGATAGCTCGGAAATACCAGTGTCAGTAGTGTATA
AATGGTTTTGAGAATATATTAAAATCAGATATATAAAAAAAATTACTCTTCTATTTCCCAATGTTATCTTTAACA
AATCTGAAGATAGTCATGTACTTTTGGTAGTAGTTCCAAAGAAATGTTATTTGTTTATTCATCTTGATTTCATTG
TCTTCGCTTTCCTTCTAAATCTGTCCCTTCTAGGGAGCTATTGGGATTAAGTGGTCATTGATTATTATACTTTAT
TCAGTAATGTTTCTGACCCTTTCCTTCAGTGCTACTTGAGTTAATTAAGGATTAATGAACAGTTACATTTCCAAG
CATTAGCTAATAAACTAAAGGATTTTGCACTTTTCTTCACTGACCATTAGTTAGAAAGAGTTCAGAGATAAGTAT
GTGTATCTTTCAATTTCAGCAAACCTAATTTTTTAAAAAAAGTTTTACATAGGAAATATGTTGGAAATGATACTT
TACAAAGATATTCATAATTTTTTTTTGTAATCAGCTACTTTGTATATTTACATGAGCCTTAATTTATATTTCTCA
TATAACCATTTATGAGAGCTTAGTATACCTGTGTCATTATATTGCATCTACGAACTAGTGACCTTATTCCTTCTG
TTACCTCAAACAGGTGGCTTTCCATCTGTGATCTCCAAAGCCTTAGGTTGCACAGAGTGACTGCCGAGCTGCTTT
ATGAAGGGAGAAAGGCTCCATAGTTGGAGTGTTTTTTTTTTTTTTTTTAAACATTTTTCCCATCCTCCATCCTCT
TGAGGGAGAATAGCTTACCTTTTATCTTGTTTTAATTTGAGAAAGAAGTTGCCACCACTCTAGGTTGAAAACCAC
TCCTTTAACATAATAACTGTGGATATGGTTTGAATTTCAAGATAGTTACATGCCTTTTTATTTTTCCTAATAGAG
CTGTAGGTCAAATATTATTAGAATCAGATTTCTAAATCCCACCCAATGACCTGCTTATTTTAAATCAAATTCAAT
AATTAATTCTCTTCTTTTTGGAGGATCTGGACATTCTTTGATATTTCTTACAACGAATTTCATGTGTAGACCCAC
TAAACAGAAGCTATAAAAGTTGCATGGTCAAATAAGTCTGAGAAAGTCTGCAGATGATATAATTCACCTGAAGAG
TCACAGTATGTAGCCAAATGTTAAAGGTTTTGAGATGCCATACAGTAAATTTACCAAGCATTTTCTAAATTTATT
TGACCACAGAATCCCTATTTTAAGCAACAACTGTTACATCCCATGGATTCCAGGTGACTAAAGAATACTTATTTC
TTAGGATATGTTTTATTGATAATAACAATTAAAATTTCAGATATCTTTCATAAGCAAATCAGTGGTCTTTTTACT
TCATGTTTTAATGCTAAAATATTTTCTTTTATAGATAGTCAGAACATTATGCCTTTTTCTGACTCCAGCAGAGAG
AAAATGCTCCAGGTTATGTGAAGCAGAATCATCATTTAAATATGAGTCAGGGCTCTTTGTACAAGGCCTGCTAAA
GGTATAGTTTCTAGTTATCACAAGTGAAACCACTTTTCTAAAATCATTTTTGAGACTCTTTATAGACAAATCTTA
AATATTAGCATTTAATGTATCTCATATTGACATGCCCAGAGACTGACTTCCTTTACACAGTTCTGCACATAGACT
ATATGTCTTATGGATTTATAGTTAGTATCATCAGTGAAACACCATAGAATACCCTTTGTGTTCCAGGTGGGTCCC
TGTTCCTACATGTCTAGCCTCAGGACTTTTTTTTTTTTAACACATGCTTAAATCAGGTTGCACATCAAAAATAAG
ATCATTTCTTTTTAACTAAATAGATTTGAATTTTATTGAAAAAAAATTTTAAACATCTTTAAGAAGCTTATAGGA
TTTAAGCAATTCCTATGTATGTGTACTAAAATATATATATTTCTATATATAATATATATTAGAAAAAAATTGTAT
TTTTCTTTTATTTGAGTCTACTGTCAAGGAGCAAAACAGAGAAATGTAAATTAGCAATTATTTATAATACTTAAA
GGGAAGAAAGTTGTTCACCTTGTTGAATCTATTATTGTTATTTCAATTATAGTCCCAAGACGTGAAGAAATAGCT
TTCCTAATGGTTATGTGATTGTCTCATAGTGACTACTTTCTTGAGGATGTAGCCACGGCAAAATGAAATAAAAAA
ATTTAAAAATTGTTGCAAATACAAGTTATATTAGGCTTTTGTGCATTTTCAATAATGTGCTGCTATGAACTCAGA
ATGATAGTATTTAAATATAGAAACTAGTTAAAGGAAACGTAGTTTCTATTTGAGTTATACATATCTGTAAATTAG
AACTTCTCCTGTTAAAGGCATAATAAAGTGCTTAATACTTTTGTTTCCTCAGCACCCTCTCATTTAATTATATAA
TTTTAGTTCTGAAAGGGACCTATACCAGATGCCTAGAGGAAATTTCAAAACTATGATCTAATGAAAAAATATTTA
ATAGTTCTCCATGCAAATACAAATCATATAGTTTTCCAGAAAATACCTTTGACATTATACAAAGATGATTATCAC
AGCATTATAATAGTAAAAAAATGGAAATAGCCTCTTTCTTCTGTTCTGTTCATAGCACAGTGCCTCATACGCAGT
AGGTTATTATTACATGGTAACTGGCTACCCCAACTGATTAGGAAAGAAGTAAATTTGTTTTATAAAAATACATAC
TCATTGAGGTGCATAGAATAATTAAGAAATTAAAAGACACTTGTAATTTTGAATCCAGTGAATACCCACTGTTAA
TATTTGGTATATCTCTTTCTAGTCTTTTTTTCCCTTTTGCATGTATTTTCTTTAAGACTCCCACCCCCACTGGAT
CATCTCTGCATGTTCTAATCTGCTTTTTTCACAGCAGATTCTAAGCCTCTTTGAATATCAACACAAACTTCAACA
ACTTCATCTATAGATGCCAAATAATAAATTCATTTTTATTTACTTAACCACTTCCTTTGGATGCTTAGGTCATTC
TGATGTTTTGCTATTGAAACCAATGCTATACTGAACACTTCTGTCACTAAAACTTTGCACACACTCATGAATAGC
TTCTTAGGATAAATTTTTAGAGATGGATTTGCTAAATCAGAGACCATTTTTTAAAATTAAAAAACAATTATTCAT
ATCGTTTGGCATGTAAGACAGTAAATTTTCCTTTTATTTTGACAGGATTCAACTGGAAGCTTTGTGCTGCCTTTC
CGGCAAGTCATGTATGCTCCATATCCCACCACACACATAGATGTGGATGTCAATACTGTGAAGCAGATGCCACCC
TGTCATGAACATATTTATAATCAGCGTAGATACATGAGATCCGAGCTGACAGCCTTCTGGAGAGCCACTTCAGAA
GAAGACATGGCTCAGGATACGATCATCTACACTGACGAAAGCTTTACTCCTGATTTGTACGTAATGCTCTGCCTG
CTGGTACTGTAGTCAAGCAATATGAAATTGTGTCTTTTACGAATAAAAACAAAACAGAAGTTGCATTTAAAAAGA
AAGAAATATTACCAGCAGAATTATGCTTGAAGAAACATTTAATCAAGCATTTTTTTCTTAAATGTTCTTCTTTTT
CCATACAATTGTGTTTACCCTAAAATAGGTAAGATTAACCCTTAAAGTAAATATTTAACTATTTGTTTAATAAAT
ATATATTGAGCTCCTAGGCACTGTTCTAGGTACCGGGCTTAATAGTGGCCAACCAGACAGCCCCAGCCCCAGCCC
CTACATTGTGTATAGTCTATTATGTAACAGTTATTGAATGGACTTATTAACAAAACCAAAGAAGTAATTCTAAGT
CTTTTTTTTCTTGACATATGAATATAAAATACAGCAAAACTGTTAAAATATATTAATGGAACATTTTTTTACTTT
GCATTTTATATTGTTATTCACTTCTTATTTTTTTTTAAAAAAAAAAGCCTGAACAGTAAATTCAAAAGGAAAAGT
AATGATAATTAATTGTTGAGCATGGACCCAACTTGAAAAAAAAAATGATGATGATAAATCTATAATCCTAAAACC
CTAAGTAAACACTTAAAAGATGTTCTGAAATCAGGAAAAGAATTATAGTATACTTTTGTGTTTCTCTTTTATCAG
TTGAAAAAAGGCACAGTAGCTCATGCCTGTAAGAACAGAGCTTTGGGAGTGCAAGGCAGGCGGATCACTTGAGGC
CAGGAGTTCCAGACCAGCCTGGGCAACATAGTGAAACCCCATCTCTACAAAAAATAAAAAAGAATTATTGGAATG
TGTTTCTGTGTGCCTGTAATCCTAGCTATTCCGAAAGCTGAGGCAGGAGGATCTTTTGAGCCCAGGAGTTTGAGG
TTACAGGGAGTTATGATGTGCCAGTGTACTCCAGCCTGGGGAACACCGAGACTCTGTCTTATTTAAAAAAAAAAA
AAAAAAAATGCTTGCAATAATGCCTGGCACATAGAAGGTAACAGTAAGTGTTAACTGTAATAACCCAGGTCTAAG
TGTGTAAGGCAATAGAAAAATTGGGGCAAATAAGCCTGACCTATGTATCTACAGAATCAGTTTGAGCTTAGGTAA
CAGACCTGTGGAGCACCAGTAATTACACAGTAAGTGTTAACCAAAAGCATAGAATAGGAATATCTTGTTCAAGGG
ACCCCCAGCCTTATACATCTCAAGGTGCAGAAAGATGACTTAATATAGGACCCATTTTTTCCTAGTTCTCCAGAG
TTTTTATTGGTTCTTGAGAAAGTAGTAGGGGAATGTTTTAGAAAATGAATTGGTCCAACTGAAATTACATGTCAG
TAAGTTTTTATATATTGGTAAATTTTAGTAGACATGTAGAAGTTTTCTAATTAATCTGTGCCTTGAAACATTTTC
TTTTTTCCTAAAGTGCTTAGTATTTTTTCCGTTTTTTGATTGGTTACTTGGGAGCTTTTTTGAGGAAATTTAGTG
AACTGCAGAATGGGTTTGCAACCATTTGGTATTTTTGTTTTGTTTTTTAGAGGATGTATGTGTATTTTAACATTT
CTTAATCATTTTTAGCCAGCTATGTTTGTTTTGCTGATTTGACAAACTACAGTTAGACAGCTATTCTCATTTTGC
TGATCATGACAAAATAATATCCTGAATTTTTAAATTTTGCATCCAGCTCTAAATTTTCTAAACATAAAATTGTCC
AAAAAATAGTATTTTCAGCCACTAGATTGTGTGTTAAGTCTATTGTCACAGAGTCATTTTACTTTTAAGTATATG
TTTTTACATGTTAATTATGTTTGTTATTTTTAATTTTAACTTTTTAAAATAATTCCAGTCACTGCCAATACATGA
AAAATTGGTCACTGGAATTTTTTTTTTGACTTTTATTTTAGGTTCATGTGTACATGTGCAGGTGTGTTATACAGG
TAAATTGCGTGTCATGAGGGTTTGGTGTACAGGTGATTTCATTACCCAGGTAATAAGCATAGTACCCAATAGGTA
GTTTTTTGATCCTCACCCTTCTCCCACCCTCAAGTAGGCCCTGGTGTTGCTGTTTCCTTCTTTGTGTCCATGTAT
ACTCAGTGTTTAGCTCCCACTTAGAAGTGAGAACATGCGGTAGTTGGTTTTCTGTTCCTGGATTAGTTCACTTAG
GATAATGACCTCTAGCTCCATCTGGTTTTTATGGCTGCATAGTATTCCATGGTGTATATGTATCACATTTTCTTT
ATCCAGTCTACCATTGATAGGCATTTAGGTTGATTCCCTGTCTTTGTTATCATGAATAGTGCTGTGATGAACATA
CACATGCATGTGTCTTTATGGTAGAAAAATTTGTATTCCTTTAGGTACATATAGAATAATGGGGTTGCTAGGGTG
AATGGTAGTTCTATTTTCAGTTATTTGAGAAATCTTCAAACTGCTTTTCATAATAGCTAAACTAATTTACAGTCC
CGCCAGCAGTGTATAAGTGTTCCCTTTTCTCCACAACCTTGCCAACATCTGTGATTTTTTGACTTTTTAATAATA
GCCATTCCTAGAGAATTGATTTGCAATTCTCTATTAGTGATATTAAGCATTTTTTCATATGCTTTTTAGCTGTCT
GTATATATTCTTCTGAAAAATTTTCATGTCCTTTGCCCAGTTTGTAGTGGGGTGGGTTGTTTTTTGCTTGTTAAT
TAGTTTTAAGTTCCTTCCAGATTCTGCATATCCCTTTGTTGGATACATGGTTTGCAGATATTTTTCTCCCATTGT
GTAGGTTGTCTTTTACTCTGTTGATAGTTTCTTTTGCCATGCAGGAGCTCGTTAGGTCCCATTTGTGTTTGTTTT
TGTTGCAGTTGCTTTTGGCGTCTTCATCATAAAATCTGTGCCAGGGCCTATGTCCAGAATGGTATTTCCTAGGTT
GTCTTCCAGGGTTTTTACAATTTTAGATTTTACGTTTATGTCTTTAATCCATCTTGAGTTGATTTTTGTATATGG
CACAAGGAAGGGGTCCAGTTTCACTCCAATTCCTATGGCTAGCAATTATCCCAGCACCATTTATTGAATACGGAG
TCCTTTCCCCATTGCTTGTTTTTTGTCAACTTTGTTGAAGATCAGATGGTTGTAAGTGTGTGGCTTTATTTCTTG
GCTCTCTATTCTCCATTGGTCTATGTGTCTGTTTTTATAACAGTACCCTGCTGTTCAGGTTCCTATAGCCTTTTA
GTATAAAATCGGCTAATGTGATGCCTCCAGCTTTGTTCTTTTTGCTTAGGATTGCTTTGGCTATTTGGGCTCCTT
TTTGGGTCCATATTAATTTTAAAACAGTTTTTTCTGGTTTTGTGAAGGATATCATTGGTAGTTTATAGGAATAGC
ATTGAATCTGTAGATTGCTTTGGGCAGTATGGCCATTTTAACAATATTAATTCTTCCTATCTATGAATATGGAAT
GTTTTTCCATGTGTTTGTGTCATCTCTTTATACCTGATGTATAAAGAAAAGCTGGTATTATTCCTACTCAATCTG
TTCCAAAAAATTGAGGAGGAGGAACTCTTCCCTAATGAGGCCAGCATCATTCTGATACCAAAACCTGGCAGAGAC
ACAACAGAAAAAAGAAAACTTCAGGCCAATATCCTTGATGAATATAGATGCAAAAATCCTCAACAAAATACTAGC
AAACCAAATCCAGCAGCACATCAAAAAGCTGATCTACTTTGATCAAGTAGGCTTTATCCCTGGGATGCAAGGTTG
GTTCAACATACACAAATCAATAAGTGTGATTCATCACATAAACAGAGCTAAAAACAAAAACCACAAGATTATCTC
AATAGGTAGAGAAAAGGTTGTCAATAAAATTTAACATCCTCCATGTTAAAAACCTTCAGTAGGTCAGGTGTAGTG
ACTCACACCTGTAATCCCAGCACTTTGGGAGGCCAAGGCGGGCATATCTCTTAAGCCCAGGAGTTCAAGACGAGC
CTAGGCAGCATGGTGAAACCCCATCTCTACAAAAAAAAAAAAAAAAAAAAATTAGCTTGGTATGGTGACATGCAC
CTATAGTCCCAGCTATTCAGGAGGTTGAGGTGGGAGGATTGTTTGAGCCCGGGAGGCAGAGGTTGGCAGCGAGCT
GAGATCATGCCACCGCACTCCAGCCTGGGCAACGGAGTGAGACCCTGTCTCAAAAAAGAAAAATCACAAACAATC
CTAAACAAACTAGGCATTGAAGGAACATGCCTCAAAAAAATAAGAACCATCTATGACAGACCCATAGCCAATATC
TTACCAAATGGGCAAAAGCTGGAAGTATTCTCCTTGAGAACCGTAACAAGACAAGGATGTCCACTCTCACCACTC
CTTTTCAGCATAGTTCTGGAAGTCCTAGCCAGAGCAATCAGGAAAGAGAAAGAAAGAAAGACATTCAGATAGGAA
GAGAAGAAGTCAAACTATTTCTGTTTGCAGGCAGTATAATTCTGTACCTAGAAAATCTCATAGTCTCTGCCCAGA
AACTCCTAAATCTGTTAAAAATTTCAGCAAAGTTTTGGCATTCTCTATACTCCAACACCTTCCAAAGTGAGAGCA
AAATCAAGAACACAGTCCCATTCACAATAGCCGCAAAACGAATAAAATACCTAGGAATCCAGCTAACCAGGGAGG
TGAAAGATCTCTATGAGAATTACAAAACACTGCTGAAAGAAATCAGAGATGACACAAACAAATGGAAATGTTCTT
TTTTAACACCTTGCTTTATCTAATTCACTTATGATGAAGATACTCATTCAGTGGAACAGGTATAATAAGTCCACT
CGATTAAATATAAGCCTTATTCTCTTTCCAGAGCCCAAGAAGGGGCACTATCAGTGCCCAGTCAATAATGACGAA
ATGCTAATATTTTTCCCCTTTACGGTTTCTTTCTTCTGTAGTGTGGTACACTCGTTTCTTAAGATAAGGAAACTT
GAACTACCTTCCTGTTTGCTTCTACACATACCCATTCTCTTTTTTTGCCACTCTGGTCAGGTATAGGATGATCCC
TACCACTTTCAGTTAAAAACTCCTCCTCTTACTAAATGTTCTCTTACCCTCTGGCCTGAGTAGAACCTAGGGAAA
ATGGAAGAGAAAAAGATGAAAGGGAGGTGGGGCCTGGGAAGGGAATAAGTAGTCCTGTTTGTTTGTGTGTTTGCT
TTAGCACCTGCTATATCCTAGGTGCTGTGTTAGGCACACATTATTTTAAGTGGCCATTATATTACTACTACTCAC
TCTGGTCGTTGCCAAGGTAGGTAGTACTTTCTTGGATAGTTGGTTCATGTTACTTACAGATGGTGGGCTTGTTGA
GGCAAACCCAGTGGATAATCATCGGAGTGTGTTCTCTAATCTCACTCAAATTTTTCTTCACATTTTTTGGTTTGT
TTTGGTTTTTGATGGTAGTGGCTTATTTTTGTTGCTGGTTTGTTTTTTGTTTTTTTTTGAGATGGCAAGAATTGG
TAGTTTTATTTATTAATTGCCTAAGGGTCTCTACTTTTTTTAAAAGATGAGAGTAGTAAAATAGATTGATAGATA
CATACATACCCTTACTGGGGACTGCTTATATTCTTTAGAGAAAAAATTACATATTAGCCTGACAAACACCAGTAA
AATGTAAATATATCCTTGAGTAAATAAATGAATGTATATTTTGTGTCTCCAAATATATATATCTATATTCTTACA
AATGTGTTTATATGTAATATCAATTTATAAGAACTTAAAATGTTGGCTCAAGTGAGGGATTGTGGAAGGTAGCAT
TATATGGCCATTTCAACATTTGAACTTTTTTCTTTTCTTCATTTTCTTCTTTTCTTCAGGAATATTTTTCAAGAT
GTCTTACACAGAGACACTCTAGTGAAAGCCTTCCTGGATCAGGTAAATGTTGAACTTGAGATTGTCAGAGTGAAT
GATATGACATGTTTTCTTTTTTAATATATCCTACAATGCCTGTTCTATATATTTATATTCCCCTGGATCATGCCC
CAGAGTTCTGCTCAGCAATTGCAGTTAAGTTAGTTACACTACAGTTCTCAGAAGAGTCTGTGAGGGCATGTCAAG
TGCATCATTACATTGGTTGCCTCTTGTCCTAGATTTATGCTTCGGGAATTCAGACCTTTGTTTACAATATAATAA
ATATTATTGCTATCTTTTAAAGATATAATAATAAGATATAAAGTTGACCACAACTACTGTTTTTTGAAACATAGA
ATTCCTGGTTTACATGTATCAAAGTGAAATCTGACTTAGCTTTTACAGATATAATATATACATATATATATCCTG
CAATGCTTGTACTATATATGTAGTACAAGTATATATATATGTTTGTGTGTGTATATATATATAGTACGAGCATAT
ATACATATTACCAGCATTGTAGGATATATATATGTTTATATATTAAAAAAAAGTTATAAACTTAAAACCCTATTA
TGTTATGTAGAGTATATGTTATATATGATATGTAAAATATATAACATATACTCTATGATAGAGTGTAATATATTT
TTTATATATATTTTAACATTTATAAAATGATAGAATTAAGAATTGAGTCCTAATCTGTTTTATTAGGTGCTTTTT
GTAGTGTCTGGTCTTTCTAAAGTGTCTAAATGATTTTTCCTTTTGACTTATTAATGGGGAAGAGCCTGTATATTA
ACAATTAAGAGTGCAGCATTCCATACGTCAAACAACAAACATTTTAATTCAAGCATTAACCTATAACAAGTAAGT
TTTTTTTTTTTTTTTGAGAAAGGGAGGTTGTTTATTTGCCTGAAATGACTCAAAAATATTTTTGAAACATAGTGT
ACTTATTTAAATAACATCTTTATTGTTTCATTCTTTTAAAAAATATCTACTTAATTACACAGTTGAAGGAAATCG
TAGATTATATGGAACTTATTTCTTAATATATTACAGTTTGTTATAATAACATTCTGGGGATCAGGCCAGGAAACT
GTGTCATAGATAAAGCTTTGAAATAATGAGATCCTTATGTTTACTAGAAATTTTGGATTGAGATCTATGAGGTCT
GTGACATATTGCGAAGTTCAAGGAAAATTCGTAGGCCTGGAATTTCATGCTTCTCAAGCTGACATAAAATCCCTC
CCACTCTCCACCTCATCATATGCACACATTCTACTCCTACCCACCCACTCCACCCCCTGCAAAAGTACAGGTATA
TGAATGTCTCAAAACCATAGGCTCATCTTCTAGGAGCTTCAATGTTATTTGAAGATTTGGGCAGAAAAAATTAAG
TAATACGAAATAACTTATGTATGAGTTTTAAAAGTGAAGTAAACATGGATGTATTCTGAAGTAGAATGCAAAATT
TGAATGCATTTTTAAAGATAAATTAGAAAACTTCTAAAAACTGTCAGATTGTCTGGGCCTGGTGGCTTATGCCTG
TAATCCCAGCACTTTGGGAGTCCGAGGTGGGTGGATCACAAGGTCAGGAGATCGAGACCATCCTGCCAACATGGT
GAAACCCCGTCTCTACTAAGTATACAAAAATTAGCTGGGCGTGGCAGCGTGTGCCTGTAATCCCAGCTACCTGGG
AGGCTGAGGCAGGAGAATCGCTTGAACCCAGGAGGTGTAGGTTGCAGTGAGTCAAGATCGCGCCACTGCACTTTA
GCCTGGTGACAGAGCTAGACTCCGTCTCAAAAAAAAAAAAAAATATCAGATTGTTCCTACACCTAGTGCTTCTAT
ACCACACTCCTGTTAGGGGGCATCAGTGGAAATGGTTAAGGAGATGTTTAGTGTGTATTGTCTGCCAAGCACTGT
CAACACTGTCATAGAAACTTCTGTACGAGTAGAATGTGAGCAAATTATGTGTTGAAATGGTTCCTCTCCCTGCAG
GTCTTTCAGCTGAAACCTGGCTTATCTCTCAGAAGTACTTTCCTTGCACAGTTTCTACTTGTCCTTCACAGAAAA
GCCTTGACACTAATAAAATATATAGAAGACGATACGTGAGTAAAACTCCTACACGGAAGAAAAACCTTTGTACAT
TGTTTTTTTGTTTTGTTTCCTTTGTACATTTTCTATATCATAATTTTTGCGCTTCTTTTTTTTTTTTTTTTTTTT
TTTTTTCCATTATTTTTAGGCAGAAGGGAAAAAAGCCCTTTAAATCTCTTCGGAACCTGAAGATAGACCTTGATT
TAACAGCAGAGGGCGATCTTAACATAATAATGGCTCTGGCTGAGAAAATTAAACCAGGCCTACACTCTTTTATCT
TTGGAAGACCTTTCTACACTAGTGTGCAAGAACGAGATGTTCTAATGACTTTTTAAATGTGTAACTTAATAAGCC
TATTCCATCACAATCATGATCGCTGGTAAAGTAGCTCAGTGGTGTGGGGAAACGTTCCCCTGGATCATACTCCAG
AATTCTGCTCTCAGCAATTGCAGTTAAGTAAGTTACACTACAGTTCTCACAAGAGCCTGTGAGGGGATGTCAGGT
GCATCATTACATTGGGTGTCTCTTTTCCTAGATTTATGCTTTTGGGATACAGACCTATGTTTACAATATAATAAA
TATTATTGCTATCTTTTAAAGATATAATAATAGGATGTAAACTTGACCACAACTACTGTTTTTTTGAAATACATG
ATTCATGGTTTACATGTGTCAAGGTGAAATCTGAGTTGGCTTTTACAGATAGTTGACTTTCTATCTTTTGGCATT
CTTTGGTGTGTAGAATTACTGTAATACTTCTGCAATCAACTGAAAACTAGAGCCTTTAAATGATTTCAATTCCAC
AGAAAGAAAGTGAGCTTGAACATAGGATGAGCTTTAGAAAGAAAATTGATCAAGCAGATGTTTAATTGGAATTGA
TTATTAGATCCTACTTTGTGGATTTAGTCCCTGGGATTCAGTCTGTAGAAATGTCTAATAGTTCTCTATAGTCCT
TGTTCCTGGTGAACCACAGTTAGGGTGTTTTGTTTATTTTATTGTTCTTGCTATTGTTGATATTCTATGTAGTTG
AGCTCTGTAAAAGGAAATTGTATTTTATGTTTTAGTAATTGTTGCCAACTTTTTAAATTAATTTTCATTATTTTT
GAGCCAAATTGAAATGTGCACCTCCTGTGCCTTTTTTCTCCTTAGAAAATCTAATTACTTGGAACAAGTTCAGAT
TTCACTGGTCAGTCATTTTCATCTTGTTTTCTTCTTGCTAAGTCTTACCATGTACCTGCTTTGGCAATCATTGCA
ACTCTGAGATTATAAAATGCCTTAGAGAATATACTAACTAATAAGATCTTTTTTTCAGAAACAGAAAATAGTTCC
TTGAGTACTTCCTTCTTGCATTTCTGCCTATGTTTTTGAAGTTGTTGCTGTTTGCCTGCAATAGGCTATAAGGAA
TAGCAGGAGAAATTTTACTGAAGTGCTGTTTTCCTAGGTGCTACTTTGGCAGAGCTAAGTTATCTTTTGTTTTCT
TAATGCGTTTGGACCATTTTGCTGGCTATAAAATAACTGATTAATATAATTCTAACACAATGTTGACATTGTAGT
TACACAAACACAAATAAATATTTTATTTAAAATTCTGGAAGTAATATAAAAGGGAAAATATATTTATAAGAAAGG
GATAAAGGTAATAGAGCCCTTCTGCCCCCCACCCACCAAATTTACACAACAAAATGACATGTTCGAATGTGAAAG
GTCATAATAGCTTTCCCATCATGAATCAGAAAGATGTGGACAGCTTGATGTTTTAGACAACCACTGAACTAGATG
ACTGTTGTACTGTAGCTCAGTCATTTAAAAAATATATAAATACTACCTTGTAGTGTCCCATACTGTGTTTTTTAC
ATGGTAGATTCTTATTTAAGTGCTAACTGGTTATTTTCTTTGGCTGGTTTATTGTACTGTTATACAGAATGTAAG
TTGTACAGTGAAATAAGTTATTAAAGCATGTGTAAACATTGTTATATATCTTTTCTCCTAAATGGAGAATTTTGA
ATAAAATATATTTGAAATTTT
SEQ ID NO: 14
Reverse Complement of SEQ ID NO: 13
AAAATTTCAAATATATTTTATTCAAAATTCTCCATTTAGGAGAAAAGATATATAACAATGTTTACACATGCTTTA
ATAACTTATTTCACTGTACAACTTACATTCTGTATAACAGTACAATAAACCAGCCAAAGAAAATAACCAGTTAGC
ACTTAAATAAGAATCTACCATGTAAAAAACACAGTATGGGACACTACAAGGTAGTATTTATATATTTTTTAAATG
ACTGAGCTACAGTACAACAGTCATCTAGTTCAGTGGTTGTCTAAAACATCAAGCTGTCCACATCTTTCTGATTCA
TGATGGGAAAGCTATTATGACCTTTCACATTCGAACATGTCATTTTGTTGTGTAAATTTGGTGGGTGGGGGGCAG
AAGGGCTCTATTACCTTTATCCCTTTCTTATAAATATATTTTCCCTTTTATATTACTTCCAGAATTTTAAATAAA
ATATTTATTTGTGTTTGTGTAACTACAATGTCAACATTGTGTTAGAATTATATTAATCAGTTATTTTATAGCCAG
CAAAATGGTCCAAACGCATTAAGAAAACAAAAGATAACTTAGCTCTGCCAAAGTAGCACCTAGGAAAACAGCACT
TCAGTAAAATTTCTCCTGCTATTCCTTATAGCCTATTGCAGGCAAACAGCAACAACTTCAAAAACATAGGCAGAA
ATGCAAGAAGGAAGTACTCAAGGAACTATTTTCTGTTTCTGAAAAAAAGATCTTATTAGTTAGTATATTCTCTAA
GGCATTTTATAATCTCAGAGTTGCAATGATTGCCAAAGCAGGTACATGGTAAGACTTAGCAAGAAGAAAACAAGA
TGAAAATGACTGACCAGTGAAATCTGAACTTGTTCCAAGTAATTAGATTTTCTAAGGAGAAAAAAGGCACAGGAG
GTGCACATTTCAATTTGGCTCAAAAATAATGAAAATTAATTTAAAAAGTTGGCAACAATTACTAAAACATAAAAT
ACAATTTCCTTTTACAGAGCTCAACTACATAGAATATCAACAATAGCAAGAACAATAAAATAAACAAAACACCCT
AACTGTGGTTCACCAGGAACAAGGACTATAGAGAACTATTAGACATTTCTACAGACTGAATCCCAGGGACTAAAT
CCACAAAGTAGGATCTAATAATCAATTCCAATTAAACATCTGCTTGATCAATTTTCTTTCTAAAGCTCATCCTAT
GTTCAAGCTCACTTTCTTTCTGTGGAATTGAAATCATTTAAAGGCTCTAGTTTTCAGTTGATTGCAGAAGTATTA
CAGTAATTCTACACACCAAAGAATGCCAAAAGATAGAAAGTCAACTATCTGTAAAAGCCAACTCAGATTTCACCT
TGACACATGTAAACCATGAATCATGTATTTCAAAAAAACAGTAGTTGTGGTCAAGTTTACATCCTATTATTATAT
CTTTAAAAGATAGCAATAATATTTATTATATTGTAAACATAGGTCTGTATCCCAAAAGCATAAATCTAGGAAAAG
AGACACCCAATGTAATGATGCACCTGACATCCCCTCACAGGCTCTTGTGAGAACTGTAGTGTAACTTACTTAACT
GCAATTGCTGAGAGCAGAATTCTGGAGTATGATCCAGGGGAACGTTTCCCCACACCACTGAGCTACTTTACCAGC
GATCATGATTGTGATGGAATAGGCTTATTAAGTTACACATTTAAAAAGTCATTAGAACATCTCGTTCTTGCACAC
TAGTGTAGAAAGGTCTTCCAAAGATAAAAGAGTGTAGGCCTGGTTTAATTTTCTCAGCCAGAGCCATTATTATGT
TAAGATCGCCCTCTGCTGTTAAATCAAGGTCTATCTTCAGGTTCCGAAGAGATTTAAAGGGCTTTTTTCCCTTCT
GCCTAAAAATAATGGAAAAAAAAAAAAAAAAAAAAAAAAAAGAAGCGCAAAAATTATGATATAGAAAATGTACAA
AGGAAACAAAACAAAAAAACAATGTACAAAGGTTTTTCTTCCGTGTAGGAGTTTTACTCACGTATCGTCTTCTAT
ATATTTTATTAGTGTCAAGGCTTTTCTGTGAAGGACAAGTAGAAACTGTGCAAGGAAAGTACTTCTGAGAGATAA
GCCAGGTTTCAGCTGAAAGACCTGCAGGGAGAGGAACCATTTCAACACATAATTTGCTCACATTCTACTCGTACA
GAAGTTTCTATGACAGTGTTGACAGTGCTTGGCAGACAATACACACTAAACATCTCCTTAACCATTTCCACTGAT
GCCCCCTAACAGGAGTGTGGTATAGAAGCACTAGGTGTAGGAACAATCTGATATTTTTTTTTTTTTTTGAGACGG
AGTCTAGCTCTGTCACCAGGCTAAAGTGCAGTGGCGCGATCTTGACTCACTGCAACCTACACCTCCTGGGTTCAA
GCGATTCTCCTGCCTCAGCCTCCCAGGTAGCTGGGATTACAGGCACACGCTGCCACGCCCAGCTAATTTTTGTAT
ACTTAGTAGAGACGGGGTTTCACCATGTTGGCAGGATGGTCTCGATCTCCTGACCTTGTGATCCACCCACCTCGG
ACTCCCAAAGTGCTGGGATTACAGGCATAAGCCACCAGGCCCAGACAATCTGACAGTTTTTAGAAGTTTTCTAAT
TTATCTTTAAAAATGCATTCAAATTTTGCATTCTACTTCAGAATACATCCATGTTTACTTCACTTTTAAAACTCA
TACATAAGTTATTTCGTATTACTTAATTTTTTCTGCCCAAATCTTCAAATAACATTGAAGCTCCTAGAAGATGAG
CCTATGGTTTTGAGACATTCATATACCTGTACTTTTGCAGGGGGTGGAGTGGGTGGGTAGGAGTAGAATGTGTGC
ATATGATGAGGTGGAGAGTGGGAGGGATTTTATGTCAGCTTGAGAAGCATGAAATTCCAGGCCTACGAATTTTCC
TTGAACTTCGCAATATGTCACAGACCTCATAGATCTCAATCCAAAATTTCTAGTAAACATAAGGATCTCATTATT
TCAAAGCTTTATCTATGACACAGTTTCCTGGCCTGATCCCCAGAATGTTATTATAACAAACTGTAATATATTAAG
AAATAAGTTCCATATAATCTACGATTTCCTTCAACTGTGTAATTAAGTAGATATTTTTTAAAAGAATGAAACAAT
AAAGATGTTATTTAAATAAGTACACTATGTTTCAAAAATATTTTTGAGTCATTTCAGGCAAATAAACAACCTCCC
TTTCTCAAAAAAAAAAAAAAAACTTACTTGTTATAGGTTAATGCTTGAATTAAAATGTTTGTTGTTTGACGTATG
GAATGCTGCACTCTTAATTGTTAATATACAGGCTCTTCCCCATTAATAAGTCAAAAGGAAAAATCATTTAGACAC
TTTAGAAAGACCAGACACTACAAAAAGCACCTAATAAAACAGATTAGGACTCAATTCTTAATTCTATCATTTTAT
AAATGTTAAAATATATATAAAAAATATATTACACTCTATCATAGAGTATATGTTATATATTTTACATATCATATA
TAACATATACTCTACATAACATAATAGGGTTTTAAGTTTATAACTTTTTTTTAATATATAAACATATATATATCC
TACAATGCTGGTAATATGTATATATGCTCGTACTATATATATATACACACACAAACATATATATATACTTGTACT
ACATATATAGTACAAGCATTGCAGGATATATATATGTATATATTATATCTGTAAAAGCTAAGTCAGATTTCACTT
TGATACATGTAAACCAGGAATTCTATGTTTCAAAAAACAGTAGTTGTGGTCAACTTTATATCTTATTATTATATC
TTTAAAAGATAGCAATAATATTTATTATATTGTAAACAAAGGTCTGAATTCCCGAAGCATAAATCTAGGACAAGA
GGCAACCAATGTAATGATGCACTTGACATGCCCTCACAGACTCTTCTGAGAACTGTAGTGTAACTAACTTAACTG
CAATTGCTGAGCAGAACTCTGGGGCATGATCCAGGGGAATATAAATATATAGAACAGGCATTGTAGGATATATTA
AAAAAGAAAACATGTCATATCATTCACTCTGACAATCTCAAGTTCAACATTTACCTGATCCAGGAAGGCTTTCAC
TAGAGTGTCTCTGTGTAAGACATCTTGAAAAATATTCCTGAAGAAAAGAAGAAAATGAAGAAAAGAAAAAAGTTC
AAATGTTGAAATGGCCATATAATGCTACCTTCCACAATCCCTCACTTGAGCCAACATTTTAAGTTCTTATAAATT
GATATTACATATAAACACATTTGTAAGAATATAGATATATATATTTGGAGACACAAAATATACATTCATTTATTT
ACTCAAGGATATATTTACATTTTACTGGTGTTTGTCAGGCTAATATGTAATTTTTTCTCTAAAGAATATAAGCAG
TCCCCAGTAAGGGTATGTATGTATCTATCAATCTATTTTACTACTCTCATCTTTTAAAAAAAGTAGAGACCCTTA
GGCAATTAATAAATAAAACTACCAATTCTTGCCATCTCAAAAAAAAACAAAAAACAAACCAGCAACAAAAATAAG
CCACTACCATCAAAAACCAAAACAAACCAAAAAATGTGAAGAAAAATTTGAGTGAGATTAGAGAACACACTCCGA
TGATTATCCACTGGGTTTGCCTCAACAAGCCCACCATCTGTAAGTAACATGAACCAACTATCCAAGAAAGTACTA
CCTACCTTGGCAACGACCAGAGTGAGTAGTAGTAATATAATGGCCACTTAAAATAATGTGTGCCTAACACAGCAC
CTAGGATATAGCAGGTGCTAAAGCAAACACACAAACAAACAGGACTACTTATTCCCTTCCCAGGCCCCACCTCCC
TTTCATCTTTTTCTCTTCCATTTTCCCTAGGTTCTACTCAGGCCAGAGGGTAAGAGAACATTTAGTAAGAGGAGG
AGTTTTTAACTGAAAGTGGTAGGGATCATCCTATACCTGACCAGAGTGGCAAAAAAAGAGAATGGGTATGTGTAG
AAGCAAACAGGAAGGTAGTTCAAGTTTCCTTATCTTAAGAAACGAGTGTACCACACTACAGAAGAAAGAAACCGT
AAAGGGGAAAAATATTAGCATTTCGTCATTATTGACTGGGCACTGATAGTGCCCCTTCTTGGGCTCTGGAAAGAG
AATAAGGCTTATATTTAATCGAGTGGACTTATTATACCTGTTCCACTGAATGAGTATCTTCATCATAAGTGAATT
AGATAAAGCAAGGTGTTAAAAAAGAACATTTCCATTTGTTTGTGTCATCTCTGATTTCTTTCAGCAGTGTTTTGT
AATTCTCATAGAGATCTTTCACCTCCCTGGTTAGCTGGATTCCTAGGTATTTTATTCGTTTTGCGGCTATTGTGA
ATGGGACTGTGTTCTTGATTTTGCTCTCACTTTGGAAGGTGTTGGAGTATAGAGAATGCCAAAACTTTGCTGAAA
TTTTTAACAGATTTAGGAGTTTCTGGGCAGAGACTATGAGATTTTCTAGGTACAGAATTATACTGCCTGCAAACA
GAAATAGTTTGACTTCTTCTCTTCCTATCTGAATGTCTTTCTTTCTTTCTCTTTCCTGATTGCTCTGGCTAGGAC
TTCCAGAACTATGCTGAAAAGGAGTGGTGAGAGTGGACATCCTTGTCTTGTTACGGTTCTCAAGGAGAATACTTC
CAGCTTTTGCCCATTTGGTAAGATATTGGCTATGGGTCTGTCATAGATGGTTCTTATTTTTTTGAGGCATGTTCC
TTCAATGCCTAGTTTGTTTAGGATTGTTTGTGATTTTTCTTTTTTGAGACAGGGTCTCACTCCGTTGCCCAGGCT
GGAGTGCGGTGGCATGATCTCAGCTCGCTGCCAACCTCTGCCTCCCGGGCTCAAACAATCCTCCCACCTCAACCT
CCTGAATAGCTGGGACTATAGGTGCATGTCACCATACCAAGCTAATTTTTTTTTTTTTTTTTTTTTGTAGAGATG
GGGTTTCACCATGCTGCCTAGGCTCGTCTTGAACTCCTGGGCTTAAGAGATATGCCCGCCTTGGCCTCCCAAAGT
GCTGGGATTACAGGTGTGAGTCACTACACCTGACCTACTGAAGGTTTTTAACATGGAGGATGTTAAATTTTATTG
ACAACCTTTTCTCTACCTATTGAGATAATCTTGTGGTTTTTGTTTTTAGCTCTGTTTATGTGATGAATCACACTT
ATTGATTTGTGTATGTTGAACCAACCTTGCATCCCAGGGATAAAGCCTACTTGATCAAAGTAGATCAGCTTTTTG
ATGTGCTGCTGGATTTGGTTTGCTAGTATTTTGTTGAGGATTTTTGCATCTATATTCATCAAGGATATTGGCCTG
AAGTTTTCTTTTTTCTGTTGTGTCTCTGCCAGGTTTTGGTATCAGAATGATGCTGGCCTCATTAGGGAAGAGTTC
CTCCTCCTCAATTTTTTGGAACAGATTGAGTAGGAATAATACCAGCTTTTCTTTATACATCAGGTATAAAGAGAT
GACACAAACACATGGAAAAACATTCCATATTCATAGATAGGAAGAATTAATATTGTTAAAATGGCCATACTGCCC
AAAGCAATCTACAGATTCAATGCTATTCCTATAAACTACCAATGATATCCTTCACAAAACCAGAAAAAACTGTTT
TAAAATTAATATGGACCCAAAAAGGAGCCCAAATAGCCAAAGCAATCCTAAGCAAAAAGAACAAAGCTGGAGGCA
TCACATTAGCCGATTTTATACTAAAAGGCTATAGGAACCTGAACAGCAGGGTACTGTTATAAAAACAGACACATA
GACCAATGGAGAATAGAGAGCCAAGAAATAAAGCCACACACTTACAACCATCTGATCTTCAACAAAGTTGACAAA
AAACAAGCAATGGGGAAAGGACTCCGTATTCAATAAATGGTGCTGGGATAATTGCTAGCCATAGGAATTGGAGTG
AAACTGGACCCCTTCCTTGTGCCATATACAAAAATCAACTCAAGATGGATTAAAGACATAAACGTAAAATCTAAA
ATTGTAAAAACCCTGGAAGACAACCTAGGAAATACCATTCTGGACATAGGCCCTGGCACAGATTTTATGATGAAG
ACGCCAAAAGCAACTGCAACAAAAACAAACACAAATGGGACCTAACGAGCTCCTGCATGGCAAAAGAAACTATCA
ACAGAGTAAAAGACAACCTACACAATGGGAGAAAAATATCTGCAAACCATGTATCCAACAAAGGGATATGCAGAA
TCTGGAAGGAACTTAAAACTAATTAACAAGCAAAAAACAACCCACCCCACTACAAACTGGGCAAAGGACATGAAA
ATTTTTCAGAAGAATATATACAGACAGCTAAAAAGCATATGAAAAAATGCTTAATATCACTAATAGAGAATTGCA
AATCAATTCTCTAGGAATGGCTATTATTAAAAAGTCAAAAAATCACAGATGTTGGCAAGGTTGTGGAGAAAAGGG
AACACTTATACACTGCTGGCGGGACTGTAAATTAGTTTAGCTATTATGAAAAGCAGTTTGAAGATTTCTCAAATA
ACTGAAAATAGAACTACCATTCACCCTAGCAACCCCATTATTCTATATGTACCTAAAGGAATACAAATTTTTCTA
CCATAAAGACACATGCATGTGTATGTTCATCACAGCACTATTCATGATAACAAAGACAGGGAATCAACCTAAATG
CCTATCAATGGTAGACTGGATAAAGAAAATGTGATACATATACACCATGGAATACTATGCAGCCATAAAAACCAG
ATGGAGCTAGAGGTCATTATCCTAAGTGAACTAATCCAGGAACAGAAAACCAACTACCGCATGTTCTCACTTCTA
AGTGGGAGCTAAACACTGAGTATACATGGACACAAAGAAGGAAACAGCAACACCAGGGCCTACTTGAGGGTGGGA
GAAGGGTGAGGATCAAAAAACTACCTATTGGGTACTATGCTTATTACCTGGGTAATGAAATCACCTGTACACCAA
ACCCTCATGACACGCAATTTACCTGTATAACACACCTGCACATGTACACATGAACCTAAAATAAAAGTCAAAAAA
AAAATTCCAGTGACCAATTTTTCATGTATTGGCAGTGACTGGAATTATTTTAAAAAGTTAAAATTAAAAATAACA
AACATAATTAACATGTAAAAACATATACTTAAAAGTAAAATGACTCTGTGACAATAGACTTAACACACAATCTAG
TGGCTGAAAATACTATTTTTTGGACAATTTTATGTTTAGAAAATTTAGAGCTGGATGCAAAATTTAAAAATTCAG
GATATTATTTTGTCATGATCAGCAAAATGAGAATAGCTGTCTAACTGTAGTTTGTCAAATCAGCAAAACAAACAT
AGCTGGCTAAAAATGATTAAGAAATGTTAAAATACACATACATCCTCTAAAAAACAAAACAAAAATACCAAATGG
TTGCAAACCCATTCTGCAGTTCACTAAATTTCCTCAAAAAAGCTCCCAAGTAACCAATCAAAAAACGGAAAAAAT
ACTAAGCACTTTAGGAAAAAAGAAAATGTTTCAAGGCACAGATTAATTAGAAAACTTCTACATGTCTACTAAAAT
TTACCAATATATAAAAACTTACTGACATGTAATTTCAGTTGGACCAATTCATTTTCTAAAACATTCCCCTACTAC
TTTCTCAAGAACCAATAAAAACTCTGGAGAACTAGGAAAAAATGGGTCCTATATTAAGTCATCTTTCTGCACCTT
GAGATGTATAAGGCTGGGGGTCCCTTGAACAAGATATTCCTATTCTATGCTTTTGGTTAACACTTACTGTGTAAT
TACTGGTGCTCCACAGGTCTGTTACCTAAGCTCAAACTGATTCTGTAGATACATAGGTCAGGCTTATTTGCCCCA
ATTTTTCTATTGCCTTACACACTTAGACCTGGGTTATTACAGTTAACACTTACTGTTACCTTCTATGTGCCAGGC
ATTATTGCAAGCATTTTTTTTTTTTTTTTTTTAAATAAGACAGAGTCTCGGTGTTCCCCAGGCTGGAGTACACTG
GCACATCATAACTCCCTGTAACCTCAAACTCCTGGGCTCAAAAGATCCTCCTGCCTCAGCTTTCGGAATAGCTAG
GATTACAGGCACACAGAAACACATTCCAATAATTCTTTTTTATTTTTTGTAGAGATGGGGTTTCACTATGTTGCC
CAGGCTGGTCTGGAACTCCTGGCCTCAAGTGATCCGCCTGCCTTGCACTCCCAAAGCTCTGTTCTTACAGGCATG
AGCTACTGTGCCTTTTTTCAACTGATAAAAGAGAAACACAAAAGTATACTATAATTCTTTTCCTGATTTCAGAAC
ATCTTTTAAGTGTTTACTTAGGGTTTTAGGATTATAGATTTATCATCATCATTTTTTTTTTCAAGTTGGGTCCAT
GCTCAACAATTAATTATCATTACTTTTCCTTTTGAATTTACTGTTCAGGCTTTTTTTTTTAAAAAAAAATAAGAA
GTGAATAACAATATAAAATGCAAAGTAAAAAAATGTTCCATTAATATATTTTAACAGTTTTGCTGTATTTTATAT
TCATATGTCAAGAAAAAAAAGACTTAGAATTACTTCTTTGGTTTTGTTAATAAGTCCATTCAATAACTGTTACAT
AATAGACTATACACAATGTAGGGGCTGGGGCTGGGGCTGTCTGGTTGGCCACTATTAAGCCCGGTACCTAGAACA
GTGCCTAGGAGCTCAATATATATTTATTAAACAAATAGTTAAATATTTACTTTAAGGGTTAATCTTACCTATTTT
AGGGTAAACACAATTGTATGGAAAAAGAAGAACATTTAAGAAAAAAATGCTTGATTAAATGTTTCTTCAAGCATA
ATTCTGCTGGTAATATTTCTTTCTTTTTAAATGCAACTTCTGTTTTGTTTTTATTCGTAAAAGACACAATTTCAT
ATTGCTTGACTACAGTACCAGCAGGCAGAGCATTACGTACAAATCAGGAGTAAAGCTTTCGTCAGTGTAGATGAT
CGTATCCTGAGCCATGTCTTCTTCTGAAGTGGCTCTCCAGAAGGCTGTCAGCTCGGATCTCATGTATCTACGCTG
ATTATAAATATGTTCATGACAGGGTGGCATCTGCTTCACAGTATTGACATCCACATCTATGTGTGTGGTGGGATA
TGGAGCATACATGACTTGCCGGAAAGGCAGCACAAAGCTTCCAGTTGAATCCTGTCAAAATAAAAGGAAAATTTA
CTGTCTTACATGCCAAACGATATGAATAATTGTTTTTTAATTTTAAAAAATGGTCTCTGATTTAGCAAATCCATC
TCTAAAAATTTATCCTAAGAAGCTATTCATGAGTGTGTGCAAAGTTTTAGTGACAGAAGTGTTCAGTATAGCATT
GGTTTCAATAGCAAAACATCAGAATGACCTAAGCATCCAAAGGAAGTGGTTAAGTAAATAAAAATGAATTTATTA
TTTGGCATCTATAGATGAAGTTGTTGAAGTTTGTGTTGATATTCAAAGAGGCTTAGAATCTGCTGTGAAAAAAGC
AGATTAGAACATGCAGAGATGATCCAGTGGGGGTGGGAGTCTTAAAGAAAATACATGCAAAAGGGAAAAAAAGAC
TAGAAAGAGATATACCAAATATTAACAGTGGGTATTCACTGGATTCAAAATTACAAGTGTCTTTTAATTTCTTAA
TTATTCTATGCACCTCAATGAGTATGTATTTTTATAAAACAAATTTACTTCTTTCCTAATCAGTTGGGGTAGCCA
GTTACCATGTAATAATAACCTACTGCGTATGAGGCACTGTGCTATGAACAGAACAGAAGAAAGAGGCTATTTCCA
TTTTTTTACTATTATAATGCTGTGATAATCATCTTTGTATAATGTCAAAGGTATTTTCTGGAAAACTATATGATT
TGTATTTGCATGGAGAACTATTAAATATTTTTTCATTAGATCATAGTTTTGAAATTTCCTCTAGGCATCTGGTAT
AGGTCCCTTTCAGAACTAAAATTATATAATTAAATGAGAGGGTGCTGAGGAAACAAAAGTATTAAGCACTTTATT
ATGCCTTTAACAGGAGAAGTTCTAATTTACAGATATGTATAACTCAAATAGAAACTACGTTTCCTTTAACTAGTT
TCTATATTTAAATACTATCATTCTGAGTTCATAGCAGCACATTATTGAAAATGCACAAAAGCCTAATATAACTTG
TATTTGCAACAATTTTTAAATTTTTTTATTTCATTTTGCCGTGGCTACATCCTCAAGAAAGTAGTCACTATGAGA
CAATCACATAACCATTAGGAAAGCTATTTCTTCACGTCTTGGGACTATAATTGAAATAACAATAATAGATTCAAC
AAGGTGAACAACTTTCTTCCCTTTAAGTATTATAAATAATTGCTAATTTACATTTCTCTGTTTTGCTCCTTGACA
GTAGACTCAAATAAAAGAAAAATACAATTTTTTTCTAATATATATTATATATAGAAATATATATATTTTAGTACA
CATACATAGGAATTGCTTAAATCCTATAAGCTTCTTAAAGATGTTTAAAATTTTTTTTCAATAAAATTCAAATCT
ATTTAGTTAAAAAGAAATGATCTTATTTTTGATGTGCAACCTGATTTAAGCATGTGTTAAAAAAAAAAAAGTCCT
GAGGCTAGACATGTAGGAACAGGGACCCACCTGGAACACAAAGGGTATTCTATGGTGTTTCACTGATGATACTAA
CTATAAATCCATAAGACATATAGTCTATGTGCAGAACTGTGTAAAGGAAGTCAGTCTCTGGGCATGTCAATATGA
GATACATTAAATGCTAATATTTAAGATTTGTCTATAAAGAGTCTCAAAAATGATTTTAGAAAAGTGGTTTCACTT
GTGATAACTAGAAACTATACCTTTAGCAGGCCTTGTACAAAGAGCCCTGACTCATATTTAAATGATGATTCTGCT
TCACATAACCTGGAGCATTTTCTCTCTGCTGGAGTCAGAAAAAGGCATAATGTTCTGACTATCTATAAAAGAAAA
TATTTTAGCATTAAAACATGAAGTAAAAAGACCACTGATTTGCTTATGAAAGATATCTGAAATTTTAATTGTTAT
TATCAATAAAACATATCCTAAGAAATAAGTATTCTTTAGTCACCTGGAATCCATGGGATGTAACAGTTGTTGCTT
AAAATAGGGATTCTGTGGTCAAATAAATTTAGAAAATGCTTGGTAAATTTACTGTATGGCATCTCAAAACCTTTA
ACATTTGGCTACATACTGTGACTCTTCAGGTGAATTATATCATCTGCAGACTTTCTCAGACTTATTTGACCATGC
AACTTTTATAGCTTCTGTTTAGTGGGTCTACACATGAAATTCGTTGTAAGAAATATCAAAGAATGTCCAGATCCT
CCAAAAAGAAGAGAATTAATTATTGAATTTGATTTAAAATAAGCAGGTCATTGGGTGGGATTTAGAAATCTGATT
CTAATAATATTTGACCTACAGCTCTATTAGGAAAAATAAAAAGGCATGTAACTATCTTGAAATTCAAACCATATC
CACAGTTATTATGTTAAAGGAGTGGTTTTCAACCTAGAGTGGTGGCAACTTCTTTCTCAAATTAAAACAAGATAA
AAGGTAAGCTATTCTCCCTCAAGAGGATGGAGGATGGGAAAAATGTTTAAAAAAAAAAAAAAAAACACTCCAACT
ATGGAGCCTTTCTCCCTTCATAAAGCAGCTCGGCAGTCACTCTGTGCAACCTAAGGCTTTGGAGATCACAGATGG
AAAGCCACCTGTTTGAGGTAACAGAAGGAATAAGGTCACTAGTTCGTAGATGCAATATAATGACACAGGTATACT
AAGCTCTCATAAATGGTTATATGAGAAATATAAATTAAGGCTCATGTAAATATACAAAGTAGCTGATTACAAAAA
AAAATTATGAATATCTTTGTAAAGTATCATTTCCAACATATTTCCTATGTAAAACTTTTTTTAAAAAATTAGGTT
TGCTGAAATTGAAAGATACACATACTTATCTCTGAACTCTTTCTAACTAATGGTCAGTGAAGAAAAGTGCAAAAT
CCTTTAGTTTATTAGCTAATGCTTGGAAATGTAACTGTTCATTAATCCTTAATTAACTCAAGTAGCACTGAAGGA
AAGGGTCAGAAACATTACTGAATAAAGTATAATAATCAATGACCACTTAATCCCAATAGCTCCCTAGAAGGGACA
GATTTAGAAGGAAAGCGAAGACAATGAAATCAAGATGAATAAACAAATAACATTTCTTTGGAACTACTACCAAAA
GTACATGACTATCTTCAGATTTGTTAAAGATAACATTGGGAAATAGAAGAGTAATTTTTTTTATATATCTGATTT
TAATATATTCTCAAAACCATTTATACACTACTGACACTGGTATTTCCGAGCTATCAAAATAAACTGATAAATGAT
TCTTACTCAGTTTATTTCAAACTCACTGTTGCCACAAGGTGTCTTAGCAATTTGATGAGATTACATTGCCTCCTT
ATACTACTAGATCATTTTAATTGCAACCTACCATTTAAATGACAATCCATGATATATCATCAGTCTTAAAGAGTC
AAATCATTTGCTAGATTATAAAATAAACTACCTTATTTACTTTCTCTGCACTGCTACCTACTACAACGGAACAGC
CACAGGTTTGCAAGTGTGAGCTGATGGCACTGTAAGTTAAAGAAAACAGATTAAAAACATTGCCTATAAAACAAT
TTAACAAACTAAAAACAAAAAAAAGTAGGTGAGCTCTTCAAATAACTCAGAATAGCTTTATATGATAAACACCGA
AGCTATAAGCACAATGTTATCTTTTATTTGTATAGGAACCTACATTTTCTAGAGACCTTTCACAGAAATTTTCTT
ATTGAGCCTTAAAACAGCCCAATTAGTCAGTATAATATCATTTAATTAATGTATTTATTTATTGAAATACCATCA
TTTTATAGCTGAAGAAATTGACATGTAGAGAGATTAAGTGACTTACTTAAAGTCAAATGGGATTTAAAATGATGT
ATGAAAGGCTGACACTGAACAGATACAGGACTAAAGTGCTTCTGATTCAAGCCATTAAGGCTCTTAGGTTAAACA
CACTCATGCCTCTGATACTCCATCATGAGCCTAAAGGAAAAGACTGTGAACATAAAAGTGAATACTTTATACTTT
TACTTCTCTTTTATTAAAAGTAAAATTTCATGAAAATCTGTAACTGTGAAGAAACTTTAAAACAGAATATAAGAT
AATACATGTAAAGCAACTAGTAAAGGAACTAACATGTAGGCACTCAACAAATACTGGCTATTTCTAGAAGAAATG
TAAATAGGAAATGTTAGCTATGAGCTATTATTAAGTGTTTTTATGTTCCAGGCACTGTTCTAAGTGCTTTATATT
ATTTATCTTACTCAATGCTTATAACAACCCTACACATTAGGTACTATTACTATTATTGCCATTTTACAGATGAGG
AAATAGGTGTATAGAGAATTCAGGCACCTTGCCCACGGGTACACAGCATTAATCCAGGGAGTCTGGTTTAAGGGC
ACAAACTCTTAAGTACTAAACTCCACTGCTGGATGGAAAAAGATCAGTATAAATATGAATAATTTTGTTCTACGC
CTAAATAACTTAAGTTCATCTACAGTACAACTTAATATGAAAGGATTCTGTTAGCTTTAATGAGAAGTAAAACAA
GAAACCAGAATCAAGCAAGGGGCCATGATTTCTTGTCTGGGATGGAAACTCGGTTTCTTTAAATAGCAAATGGAA
TAACACCAAATATATATAGAAATATAATGAGTGAAAAATAACACAAATTTAAGCAACAGTTCAAATACGTAATGT
CCCTAGAACAATCTAAGTAGACAGTCTGTTATTTTCTTTCTTCCAAATCTTGTCATAGGTGAGCATAAGATGGTA
TCTGCTTCATCCAGCTTTTATGAAAAGAAAAATTCTTACTTGAGAAGAAAGCCTTCATGACAGCTGTCACCAATA
TCATCATCATTGAGTACTGTATCAGCTATCTAAAATGCATCAAAAAATAAAAAAATTAGTCTGGCTGTAACATAG
TGTTGAAATAACACTTTTAATATACAAGTTTTCGGAAGTCTGGATTCAATATAACACACTGCCTTCATTTCCGAG
AATCAAGACTCCCCAAAAAACAATCTCTGTGCACTACCATAAACTTCAGAAGAACAAATGTGAAAGCTGGTCAAG
CAGGTTAAACAATTTTTACAAGAACAACTTCCTCTTCTGAGCTGTCAGAATCAGGAGACTAACCTAAATGACAAA
ATCAGAAAACAACAAGAATAGTTTCCTAAAGGTATCTCTTAACACTCATAGTGTGTGATTCAAAACGTCCTCAAC
AAATGATTAAGGAAACTAAATTTGTGACTACAAGTAAACTTCCATTAATGGTTACTACTTTGGCACACAGTTTTG
TTTCAAAAGACACTACATTAAATATTAATTGCTCCTATAAGAGCTGGGATCCTCCCACTTTTAGGAATTATAAAA
GTAATGAAATAAACAAAATGAATTTAATTTTGTCATCACTGATCAAAAATGCCTCTGTTTTGCCATAAAATCCAG
GATTTTGTGTGTGCTTATTTGCTAAAGTGGCTAATACTGTATGTGAATAGTATGTATGACAAAGTCCTTACTATT
AAAATTAGAATATTAATAATATACATAATAATACTATAACCCCAAAAAACTCATAAAGTGTATAATTGCTCTCAT
TTAAACTTACATCTATTTCTTCAGGAACACTGTGTGATTTCATAGATGAAAGCAGTTCCATTACAGGAATCACTT
CTCCAGTAAGCATTGGAATAATACTCTGACCCTGCACAATAAAGTGACATGAAGTGAAGAAAATCACGTAATATG
AGAGAAGCTGGGCAATAAAAAATAAAAATAACATCAAACAATAACATTCTTTGATGAAAATACTTCGTAATTTGT
TCAAACACAGTATCAAACAAGTCTACTACATGTCTAAAGGATTTATATGCAATCCAAAGCTCACTTTTATTCTTT
CTTTTCTTTTTTTTTTTTTGAGATGGAGTTTTGCTTTCATTGCTCAGGCTGGAGTGCAATGGCGTGATCTCAGCT
CACTGCAACCTCTCCTCCCAGGTTCAAGTGACTCTCCTGTCTCATCCTCCCAAGTAGCTGGGACTATAGGTGCCG
CCACCATGCCCGGCTGATTTTTGTATTTTTAGTAGAGACGGGGTTTCGCCATGTTGGCCAGGTTGGTGTCAAATT
TCTGACCATGCCCGGCCCTAAAGCTCACTTTTATTCTTTAGAGAGTATGGAATCATTGGTTTATCGTTTACTGTT
ACATGCAATGATTAAGTCATCATGCCTCTTTTAGAAAAGATCTCCTTTAAAATTTGAGATAAAAAAAATTTGTTA
AAGGTCATCAATATATTTCATATTTAAAAATGAGGAAAACCAAGCACAAAAAGACTTTGAAATCCTTACCAAATA
GGTAAGGAAAACTTGAATCAATACCTAACCTCCATACTCATAAAAGTATAATCTACCCAAATGCAAATCAAAATC
AGCACATATATTTTAAGAATCAATAAAACAGAAAAATTCCCTTTAGAGCTATTTCAAGATATTACTACTTATTAC
ATCTTGAAATTGTAATTTTGAAATTTGTAGTCTATAGAATCAAACTGAAAATTCAGTATAACACATCACAAATGT
AAAGTGTCTCAAATATGGATGGTCCCTCATTTATTCACTACCACCACCAGTCTCATCAGTTTTGTGACCAACTTG
GTTAAGTAAATTTTTTGAGATATAAATGAAATTGTCAAATGACTATGCATTTTTAGCTAAACATATTTTTTAAAT
CATACATTATTTAAGATGAATTTAATACTAGTTGTTTTTCCTCACTTATTTTATGAAATGATTTTACTCAAAGTC
TTCATAAGCATCTTTAAGTTAGAATCTTTGTCAGACCCAGGGCCATTTTTGGAGTAACCTTAACCAGTTTTTCAG
AGCCCCATATTATTAAGTTGCTTGAGAATTTAAATGTGATGCTACTTCTGGAAGTTTTATCCTAAGCCATATGCC
CATTTGCATAATGCTGAAAGTTTTATTTAAAAAAAAACCATCCTTTAGTAACCTCCACAACTAACTATTCACTGT
TTTTAGTTTTTAAAGTAATAATTATCATGCCTGTTTACAATTACAATTCACACATTCAATCTAACAAGAATAATG
ACTAGATCCGTGTTAAATTTCCTTCCCTGTGAAGCAATTTTATCAGATGACAGCTACAACTGAAGTTGTTTCAAA
CTAATGCATCATCCCCAAACAGTATTGTTCAAAATAAAGTCGTTGTGAGATTTGCAAGAACTCAATCAAAAGGCA
ACTCCTCCTTTTCGGGAAGAATAATTTTGGGAAAATATTTCCTCTTAGGTTTAAGCATACATAGTATTTCATTCA
CAGTATCTCAGACATTATCAGTATAAGTGAATGAATAGCCTCACTGAAGCTCAACAACACCAAAAAAAAAAAAAA
AAAAAAAAATCCTACAGGGCTAAATACAGAAGAGGCTCTAAAAGAAAATCTCTTAAGTTTCTATTCCTCCTTGTA
CTTCCCAAACTTGAACTTCTCAGCAGTAAGATAACATTTTTAAGAAGAGCACTTAAAAGAGAGACCAAAATTCAT
TAATAGTAGTCAACTTAAGTAAAGGTTTCTGGTTTGAAAAAACAAAATCCCAGTAAAAGCAGAATTTTAGTTGGT
TCTAAGTTTCCTCAACTTGCGATAAGTTTACTTAATTAGTCTACTAATAACTAGTGGGTTAGAGGGTGCTGAAAG
TTACCCCATTCCTGGGGACCCTGCTTATTGACCAGCAAATAAGGACTGGGATTCTTTGGGTAAAGGGAAATCTTT
TCTTGTTAAGTCAGACCTTTACACAGAATAACTGTCTCTGAATTGGAAAGCTATCTACAAAAGTACAAACATAAC
AATTTGGTAAAGGAGATCATTGTATTGGGTTCTGTATTATGGCCATGTATTTTCACAAGTTTTTTTTTTTAATTA
CTTTTTTAAAGTATCATCTGTCTCATTCATGCTAAAAAGAAGCAAAGAAAGGCAAAACAGCCATGTTTAAAATAT
TGGAGTTTTACAAGGAGCATTGAGGGTCACCCACAAGAGGAAATGGAAGTAAAAGTGAAGAACTCTTTCTTCACT
GGAGATTCTCCTTCAAAAGAACTTCTCTGCTTTACAGTGAAATAGTCTGTACTTAGTTTCCGCAGGGGAAGCCAC
ACCCTTGTAACCATGCTTCTCAAACTCTTAGTGTCTGTTCCTGAGGGGCATTCAAAGCCAAGGGATAAACATGGC
ACATTTTCCTAGAGGAGAGGGTAAGAAATATCACTGACAAATTTTAATACTAAAATAGTTATGGAATAAAATGTA
AATTGCATGAGTCTTAACGATACAACATAAGACTTAGAAGAAATATTGTGTGGACCTGGGCCTACACCCCAGACA
GATACCTCAGGGGTACATATGCTCTCCTTCTGTTACAGCTACTTCTAGGGAAAGGTTCGAGAAGTAGTACCTTAA
AGAACATATCAGAGACAATTTTTTTTATTTTTACTATGAACAAGTTATCCAAAATTTATTCTGGGCAAACAGAAA
AAAAAAGGGAGCAAATATTAATTTGTAGATGCAATTACTATTTTCCTTTGTTTACTGATTTAACTCTTTGGGTTT
AAGATATGGAAATCTTCCTCCAGTTTATTCTGTACACCTCCATAAAAGCTCCATTAAAGGCTTATTCGTATGTCT
CCAAGGCCTTGACAAATGTAGCCATCAACCTTATACAGATACATGCTGTGAGAAAAACATTTGACAGTATGCAAT
TTGCATATACCTGATCTTCCATTCTCTCTGTGCCTTCTAAGATAATCTTCTGGACATTTTCTTGTCTTTCCTGAG
CAAGAGAAAATTTATTTAAAAAAACAACCCACAACATTTTGATACTTGCTTATTTTTCAATAGACATGTTCTTGT
GTAGTAATTTAGTTCACAAGAAAAATACTTTCTACTTTAGGGAAAAAATGGGGGCAGGGGTAGGAAATTAACCCA
ACAAATGCATGTTCTCATAAACAATACAAAATAAAATCAAAACAACCTTTATTCTGCAGTGAAAAAAAGATAACT
TCACAGAAAACAGTCAATGTAACATCTGCATAGTTTCAAAAAGGAAAAGAATGACTTGCACTTTTCAAATTAAAC
ATTATGATGTTGTTTAAAAGATTCTCCTGATTTTAAGAGTTTCATAATGTGAGAAAAAAGGAAGTAAGCCTGCAA
ACATAGTAAAAAATTATTCTTTTAAAAGATATTATTTTTCCTTACTATTGGGCAAAAGCCTTTTAAAACTGGTAA
TGCTTAATGGACTTTCAGGTTAGTATCAAACTGGAACACAGGAAGGAGAATTCAATGTGTTCTTTAGATACATCA
AAACTATACTGAAATGTAAATAGCATTATATATTCAACTACAGGATTTAGGAAAACAATAATTTCTGTAAGATTA
AAAGGAATTCTCTTGGGAACCATTCCATTCAACCTCCTCATTTTATGAACCTGGGAACTTGGCAAAGAGGTTAAA
GAGACCAAAGGCTACATGACCAACAGCTTATGAAACTATTACTTTGAACTGTTATACTTACACATAGTAGTAAGC
AAAAGACAGAATTGTGCAATGAAAGGGAAACAAAAGGTATTAGAGTCAAAGGCTCCCAAGAAGAATCCAGGGTCT
AAAAGTTTCTTTATTTGTCTAAGCTTTAGCTTTTCATCTATAATGTGGAGCTACCATTTCGTACCTTCCACAGTT
AATATGAAGATGACAGGTATCAGACCAGATGTATTTGTATCTAATAGGGTAAATGCAAAATAAATAACATTTATT
GTTTGATGTTCACTGCATATAATTAAAAAAATAAGATTTATATGTACCAGAAAATAAGCTTTCAACAGATAGGTT
AACATGATTAATAAGCTGAAAAATCACTTACCTTATGCATCCATATTCTTCCTTTCCGGATTATATGTGTTAATC
TATCAACACACACTCTATGAAGTGGGAGGTAGAAACTAAGTTCTGTCTGTGGAAGTATAATTGATAGTCCATATG
TGCTGCGATCCCCATTCCAGTTTCCATCAAAGATTAATGAAACAATAATCACTCCCTTTTCAGACAAGACAAAAA
ACTTTACATCTATAGCACCACTCTCTGCATTTCGAAGGATTTCTCCATTTAGAGTGTGGTTGGCAAGAAAAGTTA
TTTCTCCATCACTGAGAAGTACCTGTTCTGTCTTTGGAGCCCAAATGTGCCTTACTCTAGGACCAAGAATATTGT
CCCAGTAAGCAAAAGTAGCTGCTAATAAAGGTGATTTGCCACTTAAAGCAATCTCTGTCTTGGCAACAGCTGGAG
ATGGCGGTGGGCAAAGAGTCGACATCACTGCATTCCAACTGTCACATTATCCAAATGCTCCGGAGATATCTAAAC
AATGACATATGAAACCAATGATTAGGTTCAGCAATTTAAAGATATCCATCAAAACCCCAAATGATTTAGACATAT
TTGGTTTGTCCTCTTAAGTCAAAGATGTGGAATCCTGTTATCTCCTATCAGGATAAAGACATTCAACTAGCACAG
TAGGTGCACATTAAATGTTTGTTGATATGATCATTTTACAAGACATGGTAACTTGTTACTTATATTCAGGGCATA
CATTTAGAAATTCAAAGAAATAACTTAAAAAAGGGCTTCTTTACACTGATATTAAATGTTACATACTAAAGCTCA
TAGAATAGACCCGCAGTATTCCCAAATATCCAGTCCATGTGCAATTCTAGTATGACTGGAGATTTGGCCCCTAAC
CCATAGCAACTAAAAAGGAGAAAAACAGGAAGGGAAAGGCTCAGCTAGAGACTGACACTTGTGGGTTGAATTGTG
TCCCCCAAAAAGATATGTTCAATTCCTAACCCTTGGTGTACGTGAATGTGACCTTATCTAGAAATAAGTGTAATC
ATGTTAAAATGGGGTCATACTGGATTAGAGTGGGGCCTAATCCAATAACTGCTGTGTTTATAAGGAGAGAGATTT
GGAGACACAGAGACAAATGGTAGACAGCCATGTGAAGACAAAAGGCAGATACTGGATTGTTGAAACTACAAGGCA
AGAAAGGAACACTCAGGATTGCTGGTAACCACCAGAAGCCAGGAAGAGGCAAGGAAAGAGTCTTCTCTCTTGAAG
ATCATGCCCCTGTCAACACTTTGATTTCGGACTTCTAGCTTCTAGAATTGTGAGAGAATAAATTGCTGTTGTTTA
AAGCCACTCAGTTTGTGGTGCTTTGTTAAGTAATCTTAGAAAAGTAATACAACACCTAACAACAGAAATACTTTA
AAGCCGCTAAAAGGTCAAAAAAAAAAAAAAAAAAAAAGACATGGAAATACCACAAGTCTGGAGCCATAACAAAAA
ATGGGCAAACAGTCCTGTATCCTCAGTGAACTCTCTGGTTATGAGAATACTGAAGCCCGATCCTGATGTTTAAAA
CGACATTGAAGTATCAAGACAAAGATAAAAATATTTAATATGCTAGCCAAGAAACCAATACAGCATTTCATCACT
GCAAAGAGAGTTCTACACTAAATGGCTAGAATTTAAAAGCTTTAGTTATTTAGAACACGTAGAAAACAGAAGGGC
TAAATAGGGCCCGTTCAAGCCTTTGAATTTAATGAGAAAACAGACATGAGGAGAAGAACATAAACGCTCACATCC
AAGACAGAACCCAGGGCTCTTGGTCCCCTTGCTCAACTTGTACATCTTAATCCACATAAACATACCACTCTAAAA
AGGTACATCCTATGTGATATTAATGTAAAACAAATCATTCTTGCAAATACAGTTATGTGCCATGTAACGTTTCAG
TCAATGGTAGACTGCATATATGATGGTAGTCCCATTAGATTACAATGGACCTGAAAATATGCTATTGCCTTAGTG
ACACTGTAACCATCATAAGGTCTTAGTACTATTTTGCAAGTTATTTAAAGTATAGCACATACAATTATTACAGTG
TACAACACTTGATAATAAACTACTACATTGCTGGTTTATGTATTCACTATACTATGCCTTTTATTGTTATTTTAG
AGTGCACTCCTTCTACTTTTTTTTTTTTTAAGTTAAATGTAAAACAGCCTCAGGCAAGTCCTTCAGGAGGTATTC
AACAGAAAGCACTGTTATCATAGGTGACAGCTACATGTGTGTTATTGCCCCTAAAAACCTTCCAGTGGGACAAGA
TGTGGAGGTGGAAGGCAGTGAGGTGGAAGGGAGTGATACTGATGATCCTAATCCTGTCTATGCCTAGGTGAAAGT
GTGTGTGTTTTAGTTTTTAACAAAAACGACTAACAAGTAAAAAAAAAAATTTAAAATAGAAAATAGAAAAAAGCT
TCTAGAATAAGGATACAAAGAAAAAATATTTTTGTATAGCTATACAATGTATTTGTGTTTCAAGCTAAGTATTTT
AAAAGTTAAAAAATTAAAAAGTTTACAAAGTTAAAAAGTTATAATTTTTTATTGAAGAAAAACTGTTAAGATAAA
TTTGGTGTAGCTTCAGCGTACTGTGTTTATAGTCTACAGTGGTGTACAGTGTTCTAGGCCTTCACATTAATTCAC
CACTCACTCACTGACTCACCCAGAGCAACTTCTAGTCCTGCAAGCTCCATTCGTGGTAAGTGGCCTACACAGGTA
TACCATTATCTTTTATACCATACTTTTACTGTACCTTTTCTCTGTTTGCATATATTTAGATAAATATTTACCACT
GTGTTACAACTGTCTATAGTATTCAGTACAGTAACAGTTGTACAGGTTTGTGGCCTAGGAGCAACAGACTATACC
ATACGGCCTAGGTACATAAAGGCTATACTATCTAGGTTTGTGTAAGTACACTCTATGATGTTTGCATAATGACAA
AATCGCCTAATGATGCATTCCTAAGCAATGTGTGATTGTACTATAATTGAAGACTTGTTATCTAAGACTGAAAGT
AAAAAGAATTGCAATTTCACCTAAGCAAGTCTAAAACTGTGAAGTCTATTTATAATAATAGCAATACAAAGCAGC
TAATAGGCAAACTATGATATACCTATCTTTGCCATATGATTGCTTTGGGAGCTAACATTTGATCTGTAAATGTAT
GACAAAGTAAACAATTTTACTTAAAGAATTTCATCCACATCTTGTCAAGAGAGTTCAGTCTGATGGAAAGCACTG
ACTTCTATTTACAGAGCATTAGATGAGTGCTTTTATCATATTATGAGTAGGCATACAGAGCCTGGCAAAACAGTT
AACTCTAAGTATGTACAGAAATGGTTGAACACAACGACAGTTTTAACACGTGTATTTGTAATTTCAAAAATTCAT
TTAGGTAATATTTACTTTTAAATATGTTGTATCAATTTAATAGTCTTAAGAGACAGCACTAGATATAAGCCGTAC
AGCTTCTTTAAAATATCCACTGTTTTTAATACAATGTAAGCAGTCAGTTTACAATGATCAAATATAGGAATGTAA
TCTGAATTGAAATGGTAATGACACTACTGCTGTCATAACTAACAACAGCAAACTGGAGGCCAACATAATGAATTA
AGTTAACATACAACCATAAAATTATATTGCAAACATATTTTTCTTTCATTCTTTTAGGTTAAAAAGGTGGATAAT
CATAAAGGCAATATTACAACTCTAATATTTCATCATTAAACTGAAAATAAAAGTATTTCCTAAAACAGAACTGAA
CCCTGGAGCAAAATCTGATTGAATTATAGGGAAACTTTTACCACGTTGTGAAAATTGAACTATTATACTGCTAGT
TACACTCTCACTCCTAACAGAATAAGAAAAAAAAAATGGGCCGGGCATGGTGGGTCACACCTGTTATCCCAGCTC
TTTGGTAGGCCGAGGCAGGTGGATCACCTGAGGTCAGGAGCTCAAGACCAGCCTGGCCAACATGGTGAAACCCCA
CCTCTACTAAAAATACAAAAAATTAGCCGGGTGTGGTGGTGGACACCTGTAATCCCAGCTACTCGGGAGGCTGAG
GCAGGAGAATCTCTTGAACCCGGAGGTGGCAGAGGTTGCAATGAGCTGAGATGGCGCCACTGCACTCCAGCCTGG
GCGACAGAGAGAGACTCTGCCTCAAGAAAAAAACAAACAAACAAACAAACAAAAAGAATAAGAAAGAAAATGAAG
GACAAAGATCATACTGAATTGCTTAGTTTTAAATCCTACCAAAAGAAATAGCCTGGGAAATGAAATGTCACAGAG
AAGTATAATCAGGAGAGCTGTACAATTATTTTACTAATACTTGAAGTCATCGTCTTTGGTGAGAAAAATCCATAC
ATGCAAATGCAGCTGAAAAAAATCAGCTCAAAACCAATAGTTGTTTATGTACCTATCTTACGTACATGTAGTGCT
GTCTACTCCAGAGAGTTACCAAACATTAGCCAGTCTTTTGAGGGAAGCCAAGATTCAAATTGAGTGAGACGGTGG
CTTGCTCACAGGGTTCATGAGAGGTTTCCCAATACACTTTCTGGAAATAATCCCATACATGCAGACATGATTACA
TTAATTAACATCTGCTAAAACTGTTAGTAGAGTGCTAAGTTTGAGGTTTTGCTTTTTCTTTAAACGTCTGTTAAA
AAATCAACCATCTCTTCCCTGATTGGTATTTAGAAAGGTGGTTGGTCCACTGCTATTGTAGTGAAAATTCTACAA
TCATAAAGCCCTCACTTCTTGTTTTTTAGAGACAGGGTCTCGTTTTGTCATCCAGGCTGGAATGCACTGGCAGGA
TCATAGCTCTCGGTAACTTCAAACTCTTGGGCTCAAATGACCCTCCTGCCTCAGCCTCCCAAGTAGCTAGGACTA
CAGGTGCACATCACCACGCCCGGCTAAGTTTTTAATTTTTTGTAGAGACAGGGTCTACGTTGCCCAGGTTGAGCT
TGAACTCCTGGCTTCAAGTGATCCTCTTGCCTCCGCCTCCCAAAGCTCTGGCATTACAGGTGTAAGCCACCTTCT
CCAACCTGGCTCTCAATACTTGTAACCATGCTGTTTATTTTCTCCCAGCCCAAAGAGAAGCAGGATCCTAAACCG
TCCACTTTCCACAACAGGAGCTGCCCAGGACCACTTCAAGGACAGTGAACTGTTTACAGTACCAGAAAGTTCACA
ACACTTTCTCAATCTTCAACATCAGGGAAGACTGGAAGGTGAAGTTCATATCACTATCTGGCCATTTCTCACAGT
TCCAAGTTTCTCAGACAATAGGTAGGCTAACCTAGTCCTCCTGGGAACTATCTAATTAACGTAGAATAGAACCCG
AGGGCAGACTTGAAAAACAGAAGTCCTCCTTGGTTTACTTTGTTTCTCTGAAAGCAAATTGTGGAGTGCCAACAT
AGCCAAACAAAATATTTTATCAACTTCATAAGGTGCTTGTAATTTTTTCCTGGAGCAGGTAAATGCTGGCTTAGT
GAACAATCTGGAATGTGGTAATTACTCTCGTTCTTGTTTCAGATGTACTATCAGCATGTAGCAGTTTCCAACTGA
TTCAGGGTTTTCCTAAAGTGGCAGGCCTTGGCAGAGGTGGTGACAACAATGCCCGTGTCAAATGACACCGTATTT
CAAGTATTCTGACTCCAGGTTATTAATATCCCCTATATGATAGTCTTGTTTCTGTGATATTCACAGATTATGTTA
AAAGTTTCCCAAAGTCTGAGAAAAATCATATCTTAACAGTATCTTTTTTTTTTTTGATCCTTTGTACAAAAGTAG
AAGTAATGCCAGACAGATTACGTACCCTTGTTGTGAACAACTGGTGCATGGCAACTGTTTGAATAGAAATTTACC
AACTGCCACAACCAGGCAACTACTCTCCCAGAGCCTAACAATCTCGATTGCATCTGAAAGGGCCACCCCTCCTGG
GAAAGTGCAGGACCTCCCTCCTGTTTCTGAATACAAAGCCTGGTGGTGTTCAACGCGGCCAGATAGACCCAATGA
GCACACGGACATGTAATCTGTGCACTTCTTTAGACAACTGATTACCATCAGTCAAGTGATGCCCAAGTCACAATA
GTCACTTCCTTTAAGCAAGTCTGTGTCATCTCGGAGCTGTGAAGCAACCAGGTCATGTCCCACAGAATGGGGAGC
ACACCGACTTGCATTGCTGCCCTCATATGCAAGTCATCACCACTCTCTAGAAGCTTGGGCTGAAATTGTGCAGGC
GTCTCCACACCCCCATCTCATCCCGCATGATCTCCTCGCCGGCAGGGACCGTCTCGGGTTCCTAGCGAACCCCGA
CTTGGTCCGCAGAAGCCGCGCGCCGCCCACCCTCCGGCCTTCCCCCAGGCGAGGCCTCTCAGTACCCGAGGCTCC
CTTTTCTCGAGCCCGCAGCGGCAGCGCTCCCAGCGGGTCCCCGGGAAGGAGACAGCTCGGGTACTGAGGGCGGGA
AAGCAAGGAAGAGGCCAGATCCCCATCCCTTGTCCCTGCGCCGCCGCCGCCGCCGCCGCCGCCGGGAAGCCCGGG
GCCCGGATGCAGGCAATTCCACCAGTCGCTAGAGGCGAAAGCCCGACACCCAGCTTCGGTCAGAGAAATGAGAGG
GAAAGTAAAAATGCGTCGAGCTCTGAGGAGAGCCCCCGCTTCTACCCGCGCCTCTTCCCGGCAGCCGAACCCCAA
ACAGCCACCCGCCAGGATGCCGCCTCCTCACTCACCCACTCGCCACCGCCTGCGCCTCCGCCGCCGCGGGCGCAG
GCACCGCAACCGCAGCCCCGCCCCGGGCCCGCCCCCGGGCCCGCCCCGACCACGCCCCGGCCCCGGCCCCGGCCC
CTAGCGCGCGACTCCTGAGTTCCAGAGCTTGCTACAGGCTGCGGTTGTTTCCCTCCTTGTTTTCTTCTGGTTAAT
CTTTATCAGGTCTTTTCTTGTTCACCCTCAGCGAGTACTGTGAGAGCAAGTAGTGGGGAGAGAGGGTGGGAAAAA
CAAAAACACACACCTCCTAAACCCACACCTGCTCTTGCTAGACCCCGCCCCCAAAAGAGAAGCAACCGGGCAGCA
GGGACGGCTGACACACCAAGCGTCATCTTTTACGTGGGCGGAACTTGTCGCTGTTTGACGCACCTCTCTTTCCTA
GCGGGACACCGTAGGTTACGT
SEQ ID NO: 15
>NG_031977.2 Homo sapiens C9orf72-SMCR8 complex subunit (C9orf72) ,
RefSeqGene (LRG_658) on chromosome 9
TTGTAAGTTCTCTGAGGCATCCCCAGAAGCTGATGCTGCCATGCTTCCTATACAGCCTGCAGAACCATGAGTCAA
TTAAACCTCTTTTCTTTGTAAATTACCCAGTCTCAAGTATTTCTTTATAGCAATGCAAGAATGGACTAATACAGA
AAATTGTTACTGAGAAGAAGGGCATTGCTATAAAGATACCTGAAAATGTAGAAGTGACTTTGGAACCGGCTAACA
GGCAGAAGTTGAAACATTTTAGAGGGCTCAGAAGAAGACAGAAAGATGAGAGAAAGTTTGGAACTCGCTAGGAAC
TTGTTGAGTGGTTGTAACCAAAATACTGATAGTGATATAGACAGTGAAGTCCAGGCTGAGGAGGTCTCAGATGGA
AATGAGAAATTTATTGGGAATGAGTAAAGGTCAGGTTTGCTATGCTTTAGCAAAGAGCTTAGCTGCATTGTTCCT
CTGTTCTAGGGATCTGTGAAATCTTAGACTTAAGAATGATGATTTAGGGTATCTGGCAGAAGAAATTTCTAAGCA
GCAGAGTGTTCAAGAAGTAACCTAGCTGCTTCTAATAGCCTATGCTCATAGGCATGAGCACAGAAATGACCTGAA
ATTGGAACTTACACTTAAAAGGGAAGCAGAGCATAAAAGTTTGTAAATTTTGCAGCCTGGCCATGTGGTAGTAAA
GAAAAGCTCGTTCTCAGGAGAGGAAGTCAAGCAGGCTGCATAAATTTGCATAACTAAAAGGAAGGCAAGGGCTGA
TAACCAAAACAATGGGGAGAAAGACTCATAGGACTAACAGGCATTTTATTTTATTTTATTTTTATTTTATTATTA
TTATACTTTAAGTTTTAGGGTACATGTGCACAATGTGCAGGTTAGTTGCATATGTATACATGTGCCATGCTGGTG
TGCTGCACCCATTAACTCGTCATTTAGCATTAGGTATATCTCCTAATGCTATCCCTCCCCCCTCCCCCACCCCAC
AACAGTCCCCAGAGTGTGATGTTCCCCTTCCTGTGTCCATGTGTTCTCATTGTTCAATTCCCACCTATGAGTGAG
AACATGTGGTGTTTGGTTTTTTGACCTTGCAATAGTTTACTGAGAATGACGATTTCCAATTTCATCCATGTCCCT
ACAAAGGACATGAACTCATCATTTTTTATGGCTGCATAGTATTCCATGGTGTATATGTGCCACATTTTCTTAATC
CAGTCTATCACTGTTGGACATTTGGGTTGGTTCCAAGTCTTTGCTATTGTGAATAGTGCCACAATAAACATAGTG
TGCATGTGTCTTTATAGCAGCAGGATTTATAGTCCTTTGGGTATATACCCAGTGATGGGATGGCTGGGTCAAATG
GTATTTCTAGTTCTAGATCCCTGAGGAATCGCCACACTGACTTCCACAATGGTTGAACTAGTTTACAGTCCCACC
AACAGTGTAAAAGTGTTCCTAATAGGCATTTTAGGCTTTCATGGTGGTCCCTCTCATCACAGGCCCCGAGGCCTA
GGAGGACTGAATCATTTCCTGGGCCAGGCCTAGGGCCCCTGCTCCCTCTTACAGCCTTGGGACTCTGCTCCCTGA
ATCCCAGCTGCTCAAAGGGGCCCAGGTACTGTTACAGTAGGTAGCTAATCAGGCATGAGTGGGGTAAGAGAGAAG
TCCCCACCACCCACCAGGAATGTCAGGCAACCATCAGATGATGGTCAGGCAGTTGTCATACTGCCTCTCTAAAAT
AGTAATTGGTTGCAGCCAGCACCAGGGAGAGGCAACTTCTCAATAGATAGAAACACCTGAAATTGGTAACTGGGC
GCTTCCAATAAGATCTCAGGAACTGAGAGAGTGGGCTTAACATGCACATTAAGAGGCAAAATGGTGAAGTATGAC
CTTTGGGGGCATTCCACCGGAAAAGGGAAGAAAGCCTCAGGTAAGCATGTATACAACTCCAGTAAACACACTGCA
CACGCTCACCTTCCAAGTGCAAGCAGGGCACCATGCATGCGGCAAGCTCACCCTTAGGGAAGGACCAAGGGAAAG
GGGCACAAGATGTCAGAAGTAGGCCAGTGTATAAGATCCTAGGTTCAAGGTCAAACAGGGCACTTGACCTCCAAG
GTGCCCACTTGGGCCTCTTCCAAATGTACTTTCCTTTCATTCCTGTTCTAAAGCTTTTTAATAAACTTTTACTCC
TGCTCTGAAACTTGTCGCAGTCTCTTTTTCTGCCTTATGCCTCTTGGTCAAATTCTTTCTTCTGAGGAGGCAAGA
ATTGAGGTTGCTGCAGACCCACATGGATTTGCAGCTGGTAACTCAGATAACTTTCACCAGTAAGAATACAGTTCA
GGCTGCTGCTTCACAGGGTGCCAGGCATAAGCCTTGGTGGCTTCCATAAGCTGTGAAGCCGGCGGGCGCACATAA
TGCAAGAGTTGAGGCTTAAGAAGCTCTGCCTAGATTTTAGAGGATGTATGAAAAAGCCTGGATGTCCAGACAGAA
GCCTGTTACTGGGGTGGAATCCTCATGGAGAACATCTACTAGGGAAGCAAGGAGAAGAAATGTGGGGTTGCAGCC
CCCACAGAGAGTCCCCTGGGGCACTGCCTAGCAGAGCTATGACAAGACAGCCACCGTCCTCCAGACCCCAGAATG
GTAGATCCACCAACAACTTGCACCCTGCAGCCTGGAAAAGCTGCAAGCACTCAATGCTAGCCCATGAGAGCAGCT
GTGGGAGATGAACCCTGGAAAACCACAGGGGTGGTTCTGCCCAAGGTTTTGGGAGCCCACTCATTGCATCAGTGT
TCCCTGGGTGTGAGTCAAAGGAGATTATTTCAGAGCTTTAACATTTAATGACTGCCCGGCTGGCTTTCAGACTTG
CAATGGGGCCCTATAGCCTCTTTCTTTTGGCAGATTTCTCCCTTTCGGAATGGCAGTATCTGCCCAATGCCTATA
CCCCCATTGTATCTTTGAAGCAATTACCTTGTTTTTGATTTTACAGGTTCATAGGTAGAAGGGACTAGCTTCGTC
TCAGGTGAGACTTGGGACTTTGGACTTTTGAATGAATGCTGGATCGAGTTAAGACTTTGGGGAACTGTTGGTAAG
GCACGACAGTATTTTGCAATATGAGAAGGACATTAGATTTGGGAGGGGCCAGAGTTGGAATAACATGGTTTGGAT
CTCTGTCCCCACCCAAATCTCATGTTCAACTGTAATCCCCAGTGTTGGAGGTTGGGCCTGGTGGGAGGTGAGTGG
ATTATGGGGTGGCTTCTAATGGTTTTGTACAGTCCCCTCTTGGTACTATATAGTGAGTTCTGACAAGATCTAGTT
GTTTAAACGTATGTAGCACCTCCCATTTCTCTCTTCCCCCAGTTCCTGCCATGTGAAGTCTGGGGTCTCCCTATG
CCTTCCATCATGATTTTAAGTTCCCTATGGCCTGCCCAGAAGCTGATCCAGCCATGCTTCTTGTACAGCCTGCAG
AACTGTGAGCCATTAAACTTTTCTTTATAAATTACCCAGTTTCAGTTATTTCTTTATAGCAGTGTAAGAATGGAC
TAACACAATTATTAACGCTAGTCCTCATGTTGTACATTAAATCTCTAGATGTATTAGACGTAACTGCAACTTTGT
ACCCTACCCTACAATTTTCTTTCCCCCCAAGCCCCCCAACCAAGGGTCTACTCTGTTTCTATAAATTCAGTTGTT
TTTTAATTCCACGTATAAGTGAAGTACAACTCAGTGTAGAAACTTGGTAAATGCTAGCTACTTGTTATAAGCTGT
CAGTCAAAATAAAAATACAGAGATGAATCTCTAAATTAAGTGATTTATTTGGGAAGAAAGAATTGCAATTAGGGC
ATACATGTAGATCAGATGGTCTTCGGTATATCCACACAACAAAGAAAAGGGGGAGGTTTTGTTAAAAAAGAGAAA
TGTTACATAGTGCTCTTTGAGAAAATTCATTGGCACTATTAAGGATCTGAGGAGCTGGTGAGTTTCAACTGGTGA
GTGATGGTGGTAGATAAAATTAGAGCTGCAGCAGGTCATTTTAGCAACTATTAGATAAAACTGGTCTCAGGTCAC
AACGGGCAGTTGCAGCAGCTGGACTTGGAGAGAATTACACTGTGGGAGCAGTGTCATTTGTCCTAAGTGCTTTTC
TACCCCCTACCCCCACTATTTTAGTTGGGTATAAAAAGAATGACCCAATTTGTATGATCAACTTTCACAAAGCAT
AGAACAGTAGGAAAAGGGTCTGTTTCTGCAGAAGGTGTAGACGTTGAGAGCCATTTTGTGTATTTATTCCTCCCT
TTCTTCCTCGGTGAATGATTAAAACGTTCTGTGTGATTTTTAGTGATGAAAAAGATTAAATGCTACTCACTGTAG
TAAGTGCCATCTCACACTTGCAGATCAAAAGGCACACAGTTTAAAAAACCTTTGTTTTTTTACACATCTGAGTGG
TGTAAATGCTACTCATCTGTAGTAAGTGGAATCTATACACCTGCAGACCAAAAGACGCAAGGTTTCAAAAATCTT
TGTGTTTTTTACACATCAAACAGAATGGTACGTTTTTCAAAAGTTAAAAAAAAACAACTCATCCACATATTGCAA
CTAGCAAAAATGACATTCCCCAGTGTGAAAATCATGCTTGAGAGAATTCTTACATGTAAAGGCAAAATTGCGATG
ACTTTGCAGGGGACCGTGGGATTCCCGCCCGCAGTGCCGGAGCTGTCCCCTACCAGGGTTTGCAGTGGAGTTTTG
AATGCACTTAACAGTGTCTTACGGTAAAAACAAAATTTCATCCACCAATTATGTGTTGAGCGCCCACTGCCTACC
AAGCACAAACAAAACCATTCAAAACCACGAAATCGTCTTCACTTTCTCCAGATCCAGCAGCCTCCCCTATTAAGG
TTCGCACACGCTATTGCGCCAACGCTCCTCCAGAGCGGGTCTTAAGATAAAAGAACAGGACAAGTTGCCCCGCCC
CATTTCGCTAGCCTCGTGAGAAAACGTCATCGCACATAGAAAACAGACAGACGTAACCTACGGTGTCCCGCTAGG
AAAGAGAGGTGCGTCAAACAGCGACAAGTTCCGCCCACGTAAAAGATGACGCTTGGTGTGTCAGCCGTCCCTGCT
GCCCGGTTGCTTCTCTTTTGGGGGCGGGGTCTAGCAAGAGCAGGTGTGGGTTTAGGAGGTGTGTGTTTTTGTTTT
TCCCACCCTCTCTCCCCACTACTTGCTCTCACAGTACTCGCTGAGGGTGAACAAGAAAAGACCTGATAAAGATTA
ACCAGAAGAAAACAAGGAGGGAAACAACCGCAGCCTGTAGCAAGCTCTGGAACTCAGGAGTCGCGCGCTAGGGGC
CGGGGCCGGGGCCGGGGCGTGGTCGGGGCGGGCCCGGGGGCGGGCCCGGGGCGGGGCTGCGGTTGCGGTGCCTGC
GCCCGCGGCGGCGGAGGCGCAGGCGGTGGCGAGTGGGTGAGTGAGGAGGCGGCATCCTGGCGGGTGGCTGTTTGG
GGTTCGGCTGCCGGGAAGAGGCGCGGGTAGAAGCGGGGGCTCTCCTCAGAGCTCGACGCATTTTTACTTTCCCTC
TCATTTCTCTGACCGAAGCTGGGTGTCGGGCTTTCGCCTCTAGCGACTGGTGGAATTGCCTGCATCCGGGCCCCG
GGCTTCCCGGCGGCGGCGGCGGCGGCGGCGGCGCAGGGACAAGGGATGGGGATCTGGCCTCTTCCTTGCTTTCCC
GCCCTCAGTACCCGAGCTGTCTCCTTCCCGGGGACCCGCTGGGAGCGCTGCCGCTGCGGGCTCGAGAAAAGGGAG
CCTCGGGTACTGAGAGGCCTCGCCTGGGGGAAGGCCGGAGGGTGGGCGGCGCGCGGCTTCTGCGGACCAAGTCGG
GGTTCGCTAGGAACCCGAGACGGTCCCTGCCGGCGAGGAGATCATGCGGGATGAGATGGGGGTGTGGAGACGCCT
GCACAATTTCAGCCCAAGCTTCTAGAGAGTGGTGATGACTTGCATATGAGGGCAGCAATGCAAGTCGGTGTGCTC
CCCATTCTGTGGGACATGACCTGGTTGCTTCACAGCTCCGAGATGACACAGACTTGCTTAAAGGAAGTGACTATT
GTGACTTGGGCATCACTTGACTGATGGTAATCAGTTGTCTAAAGAAGTGCACAGATTACATGTCCGTGTGCTCAT
TGGGTCTATCTGGCCGCGTTGAACACCACCAGGCTTTGTATTCAGAAACAGGAGGGAGGTCCTGCACTTTCCCAG
GAGGGGTGGCCCTTTCAGATGCAATCGAGATTGTTAGGCTCTGGGAGAGTAGTTGCCTGGTTGTGGCAGTTGGTA
AATTTCTATTCAAACAGTTGCCATGCACCAGTTGTTCACAACAAGGGTACGTAATCTGTCTGGCATTACTTCTAC
TTTTGTACAAAGGATCAAAAAAAAAAAAGATACTGTTAAGATATGATTTTTCTCAGACTTTGGGAAACTTTTAAC
ATAATCTGTGAATATCACAGAAACAAGACTATCATATAGGGGATATTAATAACCTGGAGTCAGAATACTTGAAAT
ACGGTGTCATTTGACACGGGCATTGTTGTCACCACCTCTGCCAAGGCCTGCCACTTTAGGAAAACCCTGAATCAG
TTGGAAACTGCTACATGCTGATAGTACATCTGAAACAAGAACGAGAGTAATTACCACATTCCAGATTGTTCACTA
AGCCAGCATTTACCTGCTCCAGGAAAAAATTACAAGCACCTTATGAAGTTGATAAAATATTTTGTTTGGCTATGT
TGGCACTCCACAATTTGCTTTCAGAGAAACAAAGTAAACCAAGGAGGACTTCTGTTTTTCAAGTCTGCCCTCGGG
TTCTATTCTACGTTAATTAGATAGTTCCCAGGAGGACTAGGTTAGCCTACCTATTGTCTGAGAAACTTGGAACTG
TGAGAAATGGCCAGATAGTGATATGAACTTCACCTTCCAGTCTTCCCTGATGTTGAAGATTGAGAAAGTGTTGTG
AACTTTCTGGTACTGTAAACAGTTCACTGTCCTTGAAGTGGTCCTGGGCAGCTCCTGTTGTGGAAAGTGGACGGT
TTAGGATCCTGCTTCTCTTTGGGCTGGGAGAAAATAAACAGCATGGTTACAAGTATTGAGAGCCAGGTTGGAGAA
GGTGGCTTACACCTGTAATGCCAGAGCTTTGGGAGGCGGAGGCAAGAGGATCACTTGAAGCCAGGAGTTCAAGCT
CAACCTGGGCAACGTAGACCCTGTCTCTACAAAAAATTAAAAACTTAGCCGGGCGTGGTGATGTGCACCTGTAGT
CCTAGCTACTTGGGAGGCTGAGGCAGGAGGGTCATTTGAGCCCAAGAGTTTGAAGTTACCGAGAGCTATGATCCT
GCCAGTGCATTCCAGCCTGGATGACAAAACGAGACCCTGTCTCTAAAAAACAAGAAGTGAGGGCTTTATGATTGT
AGAATTTTCACTACAATAGCAGTGGACCAACCACCTTTCTAAATACCAATCAGGGAAGAGATGGTTGATTTTTTA
ACAGACGTTTAAAGAAAAAGCAAAACCTCAAACTTAGCACTCTACTAACAGTTTTAGCAGATGTTAATTAATGTA
ATCATGTCTGCATGTATGGGATTATTTCCAGAAAGTGTATTGGGAAACCTCTCATGAACCCTGTGAGCAAGCCAC
CGTCTCACTCAATTTGAATCTTGGCTTCCCTCAAAAGACTGGCTAATGTTTGGTAACTCTCTGGAGTAGACAGCA
CTACATGTACGTAAGATAGGTACATAAACAACTATTGGTTTTGAGCTGATTTTTTTCAGCTGCATTTGCATGTAT
GGATTTTTCTCACCAAAGACGATGACTTCAAGTATTAGTAAAATAATTGTACAGCTCTCCTGATTATACTTCTCT
GTGACATTTCATTTCCCAGGCTATTTCTTTTGGTAGGATTTAAAACTAAGCAATTCAGTATGATCTTTGTCCTTC
ATTTTCTTTCTTATTCTTTTTGTTTGTTTGTTTGTTTGTTTTTTTCTTGAGGCAGAGTCTCTCTCTGTCGCCCAG
GCTGGAGTGCAGTGGCGCCATCTCAGCTCATTGCAACCTCTGCCACCTCCGGGTTCAAGAGATTCTCCTGCCTCA
GCCTCCCGAGTAGCTGGGATTACAGGTGTCCACCACCACACCCGGCTAATTTTTTGTATTTTTAGTAGAGGTGGG
GTTTCACCATGTTGGCCAGGCTGGTCTTGAGCTCCTGACCTCAGGTGATCCACCTGCCTCGGCCTACCAAAGAGC
TGGGATAACAGGTGTGACCCACCATGCCCGGCCCATTTTTTTTTTCTTATTCTGTTAGGAGTGAGAGTGTAACTA
GCAGTATAATAGTTCAATTTTCACAACGTGGTAAAAGTTTCCCTATAATTCAATCAGATTTTGCTCCAGGGTTCA
GTTCTGTTTTAGGAAATACTTTTATTTTCAGTTTAATGATGAAATATTAGAGTTGTAATATTGCCTTTATGATTA
TCCACCTTTTTAACCTAAAAGAATGAAAGAAAAATATGTTTGCAATATAATTTTATGGTTGTATGTTAACTTAAT
TCATTATGTTGGCCTCCAGTTTGCTGTTGTTAGTTATGACAGCAGTAGTGTCATTACCATTTCAATTCAGATTAC
ATTCCTATATTTGATCATTGTAAACTGACTGCTTACATTGTATTAAAAACAGTGGATATTTTAAAGAAGCTGTAC
GGCTTATATCTAGTGCTGTCTCTTAAGACTATTAAATTGATACAACATATTTAAAAGTAAATATTACCTAAATGA
ATTTTTGAAATTACAAATACACGTGTTAAAACTGTCGTTGTGTTCAACCATTTCTGTACATACTTAGAGTTAACT
GTTTTGCCAGGCTCTGTATGCCTACTCATAATATGATAAAAGCACTCATCTAATGCTCTGTAAATAGAAGTCAGT
GCTTTCCATCAGACTGAACTCTCTTGACAAGATGTGGATGAAATTCTTTAAGTAAAATTGTTTACTTTGTCATAC
ATTTACAGATCAAATGTTAGCTCCCAAAGCAATCATATGGCAAAGATAGGTATATCATAGTTTGCCTATTAGCTG
CTTTGTATTGCTATTATTATAAATAGACTTCACAGTTTTAGACTTGCTTAGGTGAAATTGCAATTCTTTTTACTT
TCAGTCTTAGATAACAAGTCTTCAATTATAGTACAATCACACATTGCTTAGGAATGCATCATTAGGCGATTTTGT
CATTATGCAAACATCATAGAGTGTACTTACACAAACCTAGATAGTATAGCCTTTATGTACCTAGGCCGTATGGTA
TAGTCTGTTGCTCCTAGGCCACAAACCTGTACAACTGTTACTGTACTGAATACTATAGACAGTTGTAACACAGTG
GTAAATATTTATCTAAATATATGCAAACAGAGAAAAGGTACAGTAAAAGTATGGTATAAAAGATAATGGTATACC
TGTGTAGGCCACTTACCACGAATGGAGCTTGCAGGACTAGAAGTTGCTCTGGGTGAGTCAGTGAGTGAGTGGTGA
ATTAATGTGAAGGCCTAGAACACTGTACACCACTGTAGACTATAAACACAGTACGCTGAAGCTACACCAAATTTA
TCTTAACAGTTTTTCTTCAATAAAAAATTATAACTTTTTAACTTTGTAAACTTTTTAATTTTTTAACTTTTAAAA
TACTTAGCTTGAAACACAAATACATTGTATAGCTATACAAAAATATTTTTTCTTTGTATCCTTATTCTAGAAGCT
TTTTTCTATTTTCTATTTTAAATTTTTTTTTTTACTTGTTAGTCGTTTTTGTTAAAAACTAAAACACACACACTT
TCACCTAGGCATAGACAGGATTAGGATCATCAGTATCACTCCCTTCCACCTCACTGCCTTCCACCTCCACATCTT
GTCCCACTGGAAGGTTTTTAGGGGCAATAACACACATGTAGCTGTCACCTATGATAACAGTGCTTTCTGTTGAAT
ACCTCCTGAAGGACTTGCCTGAGGCTGTTTTACATTTAACTTAAAAAAAAAAAAAGTAGAAGGAGTGCACTCTAA
AATAACAATAAAAGGCATAGTATAGTGAATACATAAACCAGCAATGTAGTAGTTTATTATCAAGTGTTGTACACT
GTAATAATTGTATGTGCTATACTTTAAATAACTTGCAAAATAGTACTAAGACCTTATGATGGTTACAGTGTCACT
AAGGCAATAGCATATTTTCAGGTCCATTGTAATCTAATGGGACTACCATCATATATGCAGTCTACCATTGACTGA
AACGTTACATGGCACATAACTGTATTTGCAAGAATGATTTGTTTTACATTAATATCACATAGGATGTACCTTTTT
AGAGTGGTATGTTTATGTGGATTAAGATGTACAAGTTGAGCAAGGGGACCAAGAGCCCTGGGTTCTGTCTTGGAT
GTGAGCGTTTATGTTCTTCTCCTCATGTCTGTTTTCTCATTAAATTCAAAGGCTTGAACGGGCCCTATTTAGCCC
TTCTGTTTTCTACGTGTTCTAAATAACTAAAGCTTTTAAATTCTAGCCATTTAGTGTAGAACTCTCTTTGCAGTG
ATGAAATGCTGTATTGGTTTCTTGGCTAGCATATTAAATATTTTTATCTTTGTCTTGATACTTCAATGTCGTTTT
AAACATCAGGATCGGGCTTCAGTATTCTCATAACCAGAGAGTTCACTGAGGATACAGGACTGTTTGCCCATTTTT
TGTTATGGCTCCAGACTTGTGGTATTTCCATGTCTTTTTTTTTTTTTTTTTTTTTGACCTTTTAGCGGCTTTAAA
GTATTTCTGTTGTTAGGTGTTGTATTACTTTTCTAAGATTACTTAACAAAGCACCACAAACTGAGTGGCTTTAAA
CAACAGCAATTTATTCTCTCACAATTCTAGAAGCTAGAAGTCCGAAATCAAAGTGTTGACAGGGGCATGATCTTC
AAGAGAGAAGACTCTTTCCTTGCCTCTTCCTGGCTTCTGGTGGTTACCAGCAATCCTGAGTGTTCCTTTCTTGCC
TTGTAGTTTCAACAATCCAGTATCTGCCTTTTGTCTTCACATGGCTGTCTACCATTTGTCTCTGTGTCTCCAAAT
CTCTCTCCTTATAAACACAGCAGTTATTGGATTAGGCCCCACTCTAATCCAGTATGACCCCATTTTAACATGATT
ACACTTATTTCTAGATAAGGTCACATTCACGTACACCAAGGGTTAGGAATTGAACATATCTTTTTGGGGGACACA
ATTCAACCCACAAGTGTCAGTCTCTAGCTGAGCCTTTCCCTTCCTGTTTTTCTCCTTTTTAGTTGCTATGGGTTA
GGGGCCAAATCTCCAGTCATACTAGAATTGCACATGGACTGGATATTTGGGAATACTGCGGGTCTATTCTATGAG
CTTTAGTATGTAACATTTAATATCAGTGTAAAGAAGCCCTTTTTTAAGTTATTTCTTTGAATTTCTAAATGTATG
CCCTGAATATAAGTAACAAGTTACCATGTCTTGTAAAATGATCATATCAACAAACATTTAATGTGCACCTACTGT
GCTAGTTGAATGTCTTTATCCTGATAGGAGATAACAGGATTCCACATCTTTGACTTAAGAGGACAAACCAAATAT
GTCTAAATCATTTGGGGTTTTGATGGATATCTTTAAATTGCTGAACCTAATCATTGGTTTCATATGTCATTGTTT
AGATATCTCCGGAGCATTTGGATAATGTGACAGTTGGAATGCAGTGATGTCGACTCTTTGCCCACCGCCATCTCC
AGCTGTTGCCAAGACAGAGATTGCTTTAAGTGGCAAATCACCTTTATTAGCAGCTACTTTTGCTTACTGGGACAA
TATTCTTGGTCCTAGAGTAAGGCACATTTGGGCTCCAAAGACAGAACAGGTACTTCTCAGTGATGGAGAAATAAC
TTTTCTTGCCAACCACACTCTAAATGGAGAAATCCTTCGAAATGCAGAGAGTGGTGCTATAGATGTAAAGTTTTT
TGTCTTGTCTGAAAAGGGAGTGATTATTGTTTCATTAATCTTTGATGGAAACTGGAATGGGGATCGCAGCACATA
TGGACTATCAATTATACTTCCACAGACAGAACTTAGTTTCTACCTCCCACTTCATAGAGTGTGTGTTGATAGATT
AACACATATAATCCGGAAAGGAAGAATATGGATGCATAAGGTAAGTGATTTTTCAGCTTATTAATCATGTTAACC
TATCTGTTGAAAGCTTATTTTCTGGTACATATAAATCTTATTTTTTTAATTATATGCAGTGAACATCAAACAATA
AATGTTATTTATTTTGCATTTACCCTATTAGATACAAATACATCTGGTCTGATACCTGTCATCTTCATATTAACT
GTGGAAGGTACGAAATGGTAGCTCCACATTATAGATGAAAAGCTAAAGCTTAGACAAATAAAGAAACTTTTAGAC
CCTGGATTCTTCTTGGGAGCCTTTGACTCTAATACCTTTTGTTTCCCTTTCATTGCACAATTCTGTCTTTTGCTT
ACTACTATGTGTAAGTATAACAGTTCAAAGTAATAGTTTCATAAGCTGTTGGTCATGTAGCCTTTGGTCTCTTTA
ACCTCTTTGCCAAGTTCCCAGGTTCATAAAATGAGGAGGTTGAATGGAATGGTTCCCAAGAGAATTCCTTTTAAT
CTTACAGAAATTATTGTTTTCCTAAATCCTGTAGTTGAATATATAATGCTATTTACATTTCAGTATAGTTTTGAT
GTATCTAAAGAACACATTGAATTCTCCTTCCTGTGTTCCAGTTTGATACTAACCTGAAAGTCCATTAAGCATTAC
CAGTTTTAAAAGGCTTTTGCCCAATAGTAAGGAAAAATAATATCTTTTAAAAGAATAATTTTTTACTATGTTTGC
AGGCTTACTTCCTTTTTTCTCACATTATGAAACTCTTAAAATCAGGAGAATCTTTTAAACAACATCATAATGTTT
AATTTGAAAAGTGCAAGTCATTCTTTTCCTTTTTGAAACTATGCAGATGTTACATTGACTGTTTTCTGTGAAGTT
ATCTTTTTTTCACTGCAGAATAAAGGTTGTTTTGATTTTATTTTGTATTGTTTATGAGAACATGCATTTGTTGGG
TTAATTTCCTACCCCTGCCCCCATTTTTTCCCTAAAGTAGAAAGTATTTTTCTTGTGAACTAAATTACTACACAA
GAACATGTCTATTGAAAAATAAGCAAGTATCAAAATGTTGTGGGTTGTTTTTTTAAATAAATTTTCTCTTGCTCA
GGAAAGACAAGAAAATGTCCAGAAGATTATCTTAGAAGGCACAGAGAGAATGGAAGATCAGGTATATGCAAATTG
CATACTGTCAAATGTTTTTCTCACAGCATGTATCTGTATAAGGTTGATGGCTACATTTGTCAAGGCCTTGGAGAC
ATACGAATAAGCCTTTAATGGAGCTTTTATGGAGGTGTACAGAATAAACTGGAGGAAGATTTCCATATCTTAAAC
CCAAAGAGTTAAATCAGTAAACAAAGGAAAATAGTAATTGCATCTACAAATTAATATTTGCTCCCTTTTTTTTTC
TGTTTGCCCAGAATAAATTTTGGATAACTTGTTCATAGTAAAAATAAAAAAAATTGTCTCTGATATGTTCTTTAA
GGTACTACTTCTCGAACCTTTCCCTAGAAGTAGCTGTAACAGAAGGAGAGCATATGTACCCCTGAGGTATCTGTC
TGGGGTGTAGGCCCAGGTCCACACAATATTTCTTCTAAGTCTTATGTTGTATCGTTAAGACTCATGCAATTTACA
TTTTATTCCATAACTATTTTAGTATTAAAATTTGTCAGTGATATTTCTTACCCTCTCCTCTAGGAAAATGTGCCA
TGTTTATCCCTTGGCTTTGAATGCCCCTCAGGAACAGACACTAAGAGTTTGAGAAGCATGGTTACAAGGGTGTGG
CTTCCCCTGCGGAAACTAAGTACAGACTATTTCACTGTAAAGCAGAGAAGTTCTTTTGAAGGAGAATCTCCAGTG
AAGAAAGAGTTCTTCACTTTTACTTCCATTTCCTCTTGTGGGTGACCCTCAATGCTCCTTGTAAAACTCCAATAT
TTTAAACATGGCTGTTTTGCCTTTCTTTGCTTCTTTTTAGCATGAATGAGACAGATGATACTTTAAAAAAGTAAT
TAAAAAAAAAAACTTGTGAAAATACATGGCCATAATACAGAACCCAATACAATGATCTCCTTTACCAAATTGTTA
TGTTTGTACTTTTGTAGATAGCTTTCCAATTCAGAGACAGTTATTCTGTGTAAAGGTCTGACTTAACAAGAAAAG
ATTTCCCTTTACCCAAAGAATCCCAGTCCTTATTTGCTGGTCAATAAGCAGGGTCCCCAGGAATGGGGTAACTTT
CAGCACCCTCTAACCCACTAGTTATTAGTAGACTAATTAAGTAAACTTATCGCAAGTTGAGGAAACTTAGAACCA
ACTAAAATTCTGCTTTTACTGGGATTTTGTTTTTTCAAACCAGAAACCTTTACTTAAGTTGACTACTATTAATGA
ATTTTGGTCTCTCTTTTAAGTGCTCTTCTTAAAAATGTTATCTTACTGCTGAGAAGTTCAAGTTTGGGAAGTACA
AGGAGGAATAGAAACTTAAGAGATTTTCTTTTAGAGCCTCTTCTGTATTTAGCCCTGTAGGATTTTTTTTTTTTT
TTTTTTTTTTGGTGTTGTTGAGCTTCAGTGAGGCTATTCATTCACTTATACTGATAATGTCTGAGATACTGTGAA
TGAAATACTATGTATGCTTAAACCTAAGAGGAAATATTTTCCCAAAATTATTCTTCCCGAAAAGGAGGAGTTGCC
TTTTGATTGAGTTCTTGCAAATCTCACAACGACTTTATTTTGAACAATACTGTTTGGGGATGATGCATTAGTTTG
AAACAACTTCAGTTGTAGCTGTCATCTGATAAAATTGCTTCACAGGGAAGGAAATTTAACACGGATCTAGTCATT
ATTCTTGTTAGATTGAATGTGTGAATTGTAATTGTAAACAGGCATGATAATTATTACTTTAAAAACTAAAAACAG
TGAATAGTTAGTTGTGGAGGTTACTAAAGGATGGTTTTTTTTTAAATAAAACTTTCAGCATTATGCAAATGGGCA
TATGGCTTAGGATAAAACTTCCAGAAGTAGCATCACATTTAAATTCTCAAGCAACTTAATAATATGGGGCTCTGA
AAAACTGGTTAAGGTTACTCCAAAAATGGCCCTGGGTCTGACAAAGATTCTAACTTAAAGATGCTTATGAAGACT
TTGAGTAAAATCATTTCATAAAATAAGTGAGGAAAAACAACTAGTATTAAATTCATCTTAAATAATGTATGATTT
AAAAAATATGTTTAGCTAAAAATGCATAGTCATTTGACAATTTCATTTATATCTCAAAAAATTTACTTAACCAAG
TTGGTCACAAAACTGATGAGACTGGTGGTGGTAGTGAATAAATGAGGGACCATCCATATTTGAGACACTTTACAT
TTGTGATGTGTTATACTGAATTTTCAGTTTGATTCTATAGACTACAAATTTCAAAATTACAATTTCAAGATGTAA
TAAGTAGTAATATCTTGAAATAGCTCTAAAGGGAATTTTTCTGTTTTATTGATTCTTAAAATATATGTGCTGATT
TTGATTTGCATTTGGGTAGATTATACTTTTATGAGTATGGAGGTTAGGTATTGATTCAAGTTTTCCTTACCTATT
TGGTAAGGATTTCAAAGTCTTTTTGTGCTTGGTTTTCCTCATTTTTAAATATGAAATATATTGATGACCTTTAAC
AAATTTTTTTTATCTCAAATTTTAAAGGAGATCTTTTCTAAAAGAGGCATGATGACTTAATCATTGCATGTAACA
GTAAACGATAAACCAATGATTCCATACTCTCTAAAGAATAAAAGTGAGCTTTAGGGCCGGGCATGGTCAGAAATT
TGACACCAACCTGGCCAACATGGCGAAACCCCGTCTCTACTAAAAATACAAAAATCAGCCGGGCATGGTGGCGGC
ACCTATAGTCCCAGCTACTTGGGAGGATGAGACAGGAGAGTCACTTGAACCTGGGAGGAGAGGTTGCAGTGAGCT
GAGATCACGCCATTGCACTCCAGCCTGAGCAATGAAAGCAAAACTCCATCTCAAAAAAAAAAAAAGAAAAGAAAG
AATAAAAGTGAGCTTTGGATTGCATATAAATCCTTTAGACATGTAGTAGACTTGTTTGATACTGTGTTTGAACAA
ATTACGAAGTATTTTCATCAAAGAATGTTATTGTTTGATGTTATTTTTATTTTTTATTGCCCAGCTTCTCTCATA
TTACGTGATTTTCTTCACTTCATGTCACTTTATTGTGCAGGGTCAGAGTATTATTCCAATGCTTACTGGAGAAGT
GATTCCTGTAATGGAACTGCTTTCATCTATGAAATCACACAGTGTTCCTGAAGAAATAGATGTAAGTTTAAATGA
GAGCAATTATACACTTTATGAGTTTTTTGGGGTTATAGTATTATTATGTATATTATTAATATTCTAATTTTAATA
GTAAGGACTTTGTCATACATACTATTCACATACAGTATTAGCCACTTTAGCAAATAAGCACACACAAAATCCTGG
ATTTTATGGCAAAACAGAGGCATTTTTGATCAGTGATGACAAAATTAAATTCATTTTGTTTATTTCATTACTTTT
ATAATTCCTAAAAGTGGGAGGATCCCAGCTCTTATAGGAGCAATTAATATTTAATGTAGTGTCTTTTGAAACAAA
ACTGTGTGCCAAAGTAGTAACCATTAATGGAAGTTTACTTGTAGTCACAAATTTAGTTTCCTTAATCATTTGTTG
AGGACGTTTTGAATCACACACTATGAGTGTTAAGAGATACCTTTAGGAAACTATTCTTGTTGTTTTCTGATTTTG
TCATTTAGGTTAGTCTCCTGATTCTGACAGCTCAGAAGAGGAAGTTGTTCTTGTAAAAATTGTTTAACCTGCTTG
ACCAGCTTTCACATTTGTTCTTCTGAAGTTTATGGTAGTGCACAGAGATTGTTTTTTGGGGAGTCTTGATTCTCG
GAAATGAAGGCAGTGTGTTATATTGAATCCAGACTTCCGAAAACTTGTATATTAAAAGTGTTATTTCAACACTAT
GTTACAGCCAGACTAATTTTTTTATTTTTTGATGCATTTTAGATAGCTGATACAGTACTCAATGATGATGATATT
GGTGACAGCTGTCATGAAGGCTTTCTTCTCAAGTAAGAATTTTTCTTTTCATAAAAGCTGGATGAAGCAGATACC
ATCTTATGCTCACCTATGACAAGATTTGGAAGAAAGAAAATAACAGACTGTCTACTTAGATTGTTCTAGGGACAT
TACGTATTTGAACTGTTGCTTAAATTTGTGTTATTTTTCACTCATTATATTTCTATATATATTTGGTGTTATTCC
ATTTGCTATTTAAAGAAACCGAGTTTCCATCCCAGACAAGAAATCATGGCCCCTTGCTTGATTCTGGTTTCTTGT
TTTACTTCTCATTAAAGCTAACAGAATCCTTTCATATTAAGTTGTACTGTAGATGAACTTAAGTTATTTAGGCGT
AGAACAAAATTATTCATATTTATACTGATCTTTTTCCATCCAGCAGTGGAGTTTAGTACTTAAGAGTTTGTGCCC
TTAAACCAGACTCCCTGGATTAATGCTGTGTACCCGTGGGCAAGGTGCCTGAATTCTCTATACACCTATTTCCTC
ATCTGTAAAATGGCAATAATAGTAATAGTACCTAATGTGTAGGGTTGTTATAAGCATTGAGTAAGATAAATAATA
TAAAGCACTTAGAACAGTGCCTGGAACATAAAAACACTTAATAATAGCTCATAGCTAACATTTCCTATTTACATT
TCTTCTAGAAATAGCCAGTATTTGTTGAGTGCCTACATGTTAGTTCCTTTACTAGTTGCTTTACATGTATTATCT
TATATTCTGTTTTAAAGTTTCTTCACAGTTACAGATTTTCATGAAATTTTACTTTTAATAAAAGAGAAGTAAAAG
TATAAAGTATTCACTTTTATGTTCACAGTCTTTTCCTTTAGGCTCATGATGGAGTATCAGAGGCATGAGTGTGTT
TAACCTAAGAGCCTTAATGGCTTGAATCAGAAGCACTTTAGTCCTGTATCTGTTCAGTGTCAGCCTTTCATACAT
CATTTTAAATCCCATTTGACTTTAAGTAAGTCACTTAATCTCTCTACATGTCAATTTCTTCAGCTATAAAATGAT
GGTATTTCAATAAATAAATACATTAATTAAATGATATTATACTGACTAATTGGGCTGTTTTAAGGCTCAATAAGA
AAATTTCTGTGAAAGGTCTCTAGAAAATGTAGGTTCCTATACAAATAAAAGATAACATTGTGCTTATAGCTTCGG
TGTTTATCATATAAAGCTATTCTGAGTTATTTGAAGAGCTCACCTACTTTTTTTTGTTTTTAGTTTGTTAAATTG
TTTTATAGGCAATGTTTTTAATCTGTTTTCTTTAACTTACAGTGCCATCAGCTCACACTTGCAAACCTGTGGCTG
TTCCGTTGTAGTAGGTAGCAGTGCAGAGAAAGTAAATAAGGTAGTTTATTTTATAATCTAGCAAATGATTTGACT
CTTTAAGACTGATGATATATCATGGATTGTCATTTAAATGGTAGGTTGCAATTAAAATGATCTAGTAGTATAAGG
AGGCAATGTAATCTCATCAAATTGCTAAGACACCTTGTGGCAACAGTGAGTTTGAAATAAACTGAGTAAGAATCA
TTTATCAGTTTATTTTGATAGCTCGGAAATACCAGTGTCAGTAGTGTATAAATGGTTTTGAGAATATATTAAAAT
CAGATATATAAAAAAAATTACTCTTCTATTTCCCAATGTTATCTTTAACAAATCTGAAGATAGTCATGTACTTTT
GGTAGTAGTTCCAAAGAAATGTTATTTGTTTATTCATCTTGATTTCATTGTCTTCGCTTTCCTTCTAAATCTGTC
CCTTCTAGGGAGCTATTGGGATTAAGTGGTCATTGATTATTATACTTTATTCAGTAATGTTTCTGACCCTTTCCT
TCAGTGCTACTTGAGTTAATTAAGGATTAATGAACAGTTACATTTCCAAGCATTAGCTAATAAACTAAAGGATTT
TGCACTTTTCTTCACTGACCATTAGTTAGAAAGAGTTCAGAGATAAGTATGTGTATCTTTCAATTTCAGCAAACC
TAATTTTTTAAAAAAAGTTTTACATAGGAAATATGTTGGAAATGATACTTTACAAAGATATTCATAATTTTTTTT
TGTAATCAGCTACTTTGTATATTTACATGAGCCTTAATTTATATTTCTCATATAACCATTTATGAGAGCTTAGTA
TACCTGTGTCATTATATTGCATCTACGAACTAGTGACCTTATTCCTTCTGTTACCTCAAACAGGTGGCTTTCCAT
CTGTGATCTCCAAAGCCTTAGGTTGCACAGAGTGACTGCCGAGCTGCTTTATGAAGGGAGAAAGGCTCCATAGTT
GGAGTGTTTTTTTTTTTTTTTTTAAACATTTTTCCCATCCTCCATCCTCTTGAGGGAGAATAGCTTACCTTTTAT
CTTGTTTTAATTTGAGAAAGAAGTTGCCACCACTCTAGGTTGAAAACCACTCCTTTAACATAATAACTGTGGATA
TGGTTTGAATTTCAAGATAGTTACATGCCTTTTTATTTTTCCTAATAGAGCTGTAGGTCAAATATTATTAGAATC
AGATTTCTAAATCCCACCCAATGACCTGCTTATTTTAAATCAAATTCAATAATTAATTCTCTTCTTTTTGGAGGA
TCTGGACATTCTTTGATATTTCTTACAACGAATTTCATGTGTAGACCCACTAAACAGAAGCTATAAAAGTTGCAT
GGTCAAATAAGTCTGAGAAAGTCTGCAGATGATATAATTCACCTGAAGAGTCACAGTATGTAGCCAAATGTTAAA
GGTTTTGAGATGCCATACAGTAAATTTACCAAGCATTTTCTAAATTTATTTGACCACAGAATCCCTATTTTAAGC
AACAACTGTTACATCCCATGGATTCCAGGTGACTAAAGAATACTTATTTCTTAGGATATGTTTTATTGATAATAA
CAATTAAAATTTCAGATATCTTTCATAAGCAAATCAGTGGTCTTTTTACTTCATGTTTTAATGCTAAAATATTTT
CTTTTATAGATAGTCAGAACATTATGCCTTTTTCTGACTCCAGCAGAGAGAAAATGCTCCAGGTTATGTGAAGCA
GAATCATCATTTAAATATGAGTCAGGGCTCTTTGTACAAGGCCTGCTAAAGGTATAGTTTCTAGTTATCACAAGT
GAAACCACTTTTCTAAAATCATTTTTGAGACTCTTTATAGACAAATCTTAAATATTAGCATTTAATGTATCTCAT
ATTGACATGCCCAGAGACTGACTTCCTTTACACAGTTCTGCACATAGACTATATGTCTTATGGATTTATAGTTAG
TATCATCAGTGAAACACCATAGAATACCCTTTGTGTTCCAGGTGGGTCCCTGTTCCTACATGTCTAGCCTCAGGA
CTTTTTTTTTTTTAACACATGCTTAAATCAGGTTGCACATCAAAAATAAGATCATTTCTTTTTAACTAAATAGAT
TTGAATTTTATTGAAAAAAAATTTTAAACATCTTTAAGAAGCTTATAGGATTTAAGCAATTCCTATGTATGTGTA
CTAAAATATATATATTTCTATATATAATATATATTAGAAAAAAATTGTATTTTTCTTTTATTTGAGTCTACTGTC
AAGGAGCAAAACAGAGAAATGTAAATTAGCAATTATTTATAATACTTAAAGGGAAGAAAGTTGTTCACCTTGTTG
AATCTATTATTGTTATTTCAATTATAGTCCCAAGACGTGAAGAAATAGCTTTCCTAATGGTTATGTGATTGTCTC
ATAGTGACTACTTTCTTGAGGATGTAGCCACGGCAAAATGAAATAAAAAAATTTAAAAATTGTTGCAAATACAAG
TTATATTAGGCTTTTGTGCATTTTCAATAATGTGCTGCTATGAACTCAGAATGATAGTATTTAAATATAGAAACT
AGTTAAAGGAAACGTAGTTTCTATTTGAGTTATACATATCTGTAAATTAGAACTTCTCCTGTTAAAGGCATAATA
AAGTGCTTAATACTTTTGTTTCCTCAGCACCCTCTCATTTAATTATATAATTTTAGTTCTGAAAGGGACCTATAC
CAGATGCCTAGAGGAAATTTCAAAACTATGATCTAATGAAAAAATATTTAATAGTTCTCCATGCAAATACAAATC
ATATAGTTTTCCAGAAAATACCTTTGACATTATACAAAGATGATTATCACAGCATTATAATAGTAAAAAAATGGA
AATAGCCTCTTTCTTCTGTTCTGTTCATAGCACAGTGCCTCATACGCAGTAGGTTATTATTACATGGTAACTGGC
TACCCCAACTGATTAGGAAAGAAGTAAATTTGTTTTATAAAAATACATACTCATTGAGGTGCATAGAATAATTAA
GAAATTAAAAGACACTTGTAATTTTGAATCCAGTGAATACCCACTGTTAATATTTGGTATATCTCTTTCTAGTCT
TTTTTTCCCTTTTGCATGTATTTTCTTTAAGACTCCCACCCCCACTGGATCATCTCTGCATGTTCTAATCTGCTT
TTTTCACAGCAGATTCTAAGCCTCTTTGAATATCAACACAAACTTCAACAACTTCATCTATAGATGCCAAATAAT
AAATTCATTTTTATTTACTTAACCACTTCCTTTGGATGCTTAGGTCATTCTGATGTTTTGCTATTGAAACCAATG
CTATACTGAACACTTCTGTCACTAAAACTTTGCACACACTCATGAATAGCTTCTTAGGATAAATTTTTAGAGATG
GATTTGCTAAATCAGAGACCATTTTTTAAAATTAAAAAACAATTATTCATATCGTTTGGCATGTAAGACAGTAAA
TTTTCCTTTTATTTTGACAGGATTCAACTGGAAGCTTTGTGCTGCCTTTCCGGCAAGTCATGTATGCTCCATATC
CCACCACACACATAGATGTGGATGTCAATACTGTGAAGCAGATGCCACCCTGTCATGAACATATTTATAATCAGC
GTAGATACATGAGATCCGAGCTGACAGCCTTCTGGAGAGCCACTTCAGAAGAAGACATGGCTCAGGATACGATCA
TCTACACTGACGAAAGCTTTACTCCTGATTTGTACGTAATGCTCTGCCTGCTGGTACTGTAGTCAAGCAATATGA
AATTGTGTCTTTTACGAATAAAAACAAAACAGAAGTTGCATTTAAAAAGAAAGAAATATTACCAGCAGAATTATG
CTTGAAGAAACATTTAATCAAGCATTTTTTTCTTAAATGTTCTTCTTTTTCCATACAATTGTGTTTACCCTAAAA
TAGGTAAGATTAACCCTTAAAGTAAATATTTAACTATTTGTTTAATAAATATATATTGAGCTCCTAGGCACTGTT
CTAGGTACCGGGCTTAATAGTGGCCAACCAGACAGCCCCAGCCCCAGCCCCTACATTGTGTATAGTCTATTATGT
AACAGTTATTGAATGGACTTATTAACAAAACCAAAGAAGTAATTCTAAGTCTTTTTTTTCTTGACATATGAATAT
AAAATACAGCAAAACTGTTAAAATATATTAATGGAACATTTTTTTACTTTGCATTTTATATTGTTATTCACTTCT
TATTTTTTTTTAAAAAAAAAAGCCTGAACAGTAAATTCAAAAGGAAAAGTAATGATAATTAATTGTTGAGCATGG
ACCCAACTTGAAAAAAAAAATGATGATGATAAATCTATAATCCTAAAACCCTAAGTAAACACTTAAAAGATGTTC
TGAAATCAGGAAAAGAATTATAGTATACTTTTGTGTTTCTCTTTTATCAGTTGAAAAAAGGCACAGTAGCTCATG
CCTGTAAGAACAGAGCTTTGGGAGTGCAAGGCAGGCGGATCACTTGAGGCCAGGAGTTCCAGACCAGCCTGGGCA
ACATAGTGAAACCCCATCTCTACAAAAAATAAAAAAGAATTATTGGAATGTGTTTCTGTGTGCCTGTAATCCTAG
CTATTCCGAAAGCTGAGGCAGGAGGATCTTTTGAGCCCAGGAGTTTGAGGTTACAGGGAGTTATGATGTGCCAGT
GTACTCCAGCCTGGGGAACACCGAGACTCTGTCTTATTTAAAAAAAAAAAAAAAAAAATGCTTGCAATAATGCCT
GGCACATAGAAGGTAACAGTAAGTGTTAACTGTAATAACCCAGGTCTAAGTGTGTAAGGCAATAGAAAAATTGGG
GCAAATAAGCCTGACCTATGTATCTACAGAATCAGTTTGAGCTTAGGTAACAGACCTGTGGAGCACCAGTAATTA
CACAGTAAGTGTTAACCAAAAGCATAGAATAGGAATATCTTGTTCAAGGGACCCCCAGCCTTATACATCTCAAGG
TGCAGAAAGATGACTTAATATAGGACCCATTTTTTCCTAGTTCTCCAGAGTTTTTATTGGTTCTTGAGAAAGTAG
TAGGGGAATGTTTTAGAAAATGAATTGGTCCAACTGAAATTACATGTCAGTAAGTTTTTATATATTGGTAAATTT
TAGTAGACATGTAGAAGTTTTCTAATTAATCTGTGCCTTGAAACATTTTCTTTTTTCCTAAAGTGCTTAGTATTT
TTTCCGTTTTTTGATTGGTTACTTGGGAGCTTTTTTGAGGAAATTTAGTGAACTGCAGAATGGGTTTGCAACCAT
TTGGTATTTTTGTTTTGTTTTTTAGAGGATGTATGTGTATTTTAACATTTCTTAATCATTTTTAGCCAGCTATGT
TTGTTTTGCTGATTTGACAAACTACAGTTAGACAGCTATTCTCATTTTGCTGATCATGACAAAATAATATCCTGA
ATTTTTAAATTTTGCATCCAGCTCTAAATTTTCTAAACATAAAATTGTCCAAAAAATAGTATTTTCAGCCACTAG
ATTGTGTGTTAAGTCTATTGTCACAGAGTCATTTTACTTTTAAGTATATGTTTTTACATGTTAATTATGTTTGTT
ATTTTTAATTTTAACTTTTTAAAATAATTCCAGTCACTGCCAATACATGAAAAATTGGTCACTGGAATTTTTTTT
TTGACTTTTATTTTAGGTTCATGTGTACATGTGCAGGTGTGTTATACAGGTAAATTGCGTGTCATGAGGGTTTGG
TGTACAGGTGATTTCATTACCCAGGTAATAAGCATAGTACCCAATAGGTAGTTTTTTGATCCTCACCCTTCTCCC
ACCCTCAAGTAGGCCCTGGTGTTGCTGTTTCCTTCTTTGTGTCCATGTATACTCAGTGTTTAGCTCCCACTTAGA
AGTGAGAACATGCGGTAGTTGGTTTTCTGTTCCTGGATTAGTTCACTTAGGATAATGACCTCTAGCTCCATCTGG
TTTTTATGGCTGCATAGTATTCCATGGTGTATATGTATCACATTTTCTTTATCCAGTCTACCATTGATAGGCATT
TAGGTTGATTCCCTGTCTTTGTTATCATGAATAGTGCTGTGATGAACATACACATGCATGTGTCTTTATGGTAGA
AAAATTTGTATTCCTTTAGGTACATATAGAATAATGGGGTTGCTAGGGTGAATGGTAGTTCTATTTTCAGTTATT
TGAGAAATCTTCAAACTGCTTTTCATAATAGCTAAACTAATTTACAGTCCCGCCAGCAGTGTATAAGTGTTCCCT
TTTCTCCACAACCTTGCCAACATCTGTGATTTTTTGACTTTTTAATAATAGCCATTCCTAGAGAATTGATTTGCA
ATTCTCTATTAGTGATATTAAGCATTTTTTCATATGCTTTTTAGCTGTCTGTATATATTCTTCTGAAAAATTTTC
ATGTCCTTTGCCCAGTTTGTAGTGGGGTGGGTTGTTTTTTGCTTGTTAATTAGTTTTAAGTTCCTTCCAGATTCT
GCATATCCCTTTGTTGGATACATGGTTTGCAGATATTTTTCTCCCATTGTGTAGGTTGTCTTTTACTCTGTTGAT
AGTTTCTTTTGCCATGCAGGAGCTCGTTAGGTCCCATTTGTGTTTGTTTTTGTTGCAGTTGCTTTTGGCGTCTTC
ATCATAAAATCTGTGCCAGGGCCTATGTCCAGAATGGTATTTCCTAGGTTGTCTTCCAGGGTTTTTACAATTTTA
GATTTTACGTTTATGTCTTTAATCCATCTTGAGTTGATTTTTGTATATGGCACAAGGAAGGGGTCCAGTTTCACT
CCAATTCCTATGGCTAGCAATTATCCCAGCACCATTTATTGAATACGGAGTCCTTTCCCCATTGCTTGTTTTTTG
TCAACTTTGTTGAAGATCAGATGGTTGTAAGTGTGTGGCTTTATTTCTTGGCTCTCTATTCTCCATTGGTCTATG
TGTCTGTTTTTATAACAGTACCCTGCTGTTCAGGTTCCTATAGCCTTTTAGTATAAAATCGGCTAATGTGATGCC
TCCAGCTTTGTTCTTTTTGCTTAGGATTGCTTTGGCTATTTGGGCTCCTTTTTGGGTCCATATTAATTTTAAAAC
AGTTTTTTCTGGTTTTGTGAAGGATATCATTGGTAGTTTATAGGAATAGCATTGAATCTGTAGATTGCTTTGGGC
AGTATGGCCATTTTAACAATATTAATTCTTCCTATCTATGAATATGGAATGTTTTTCCATGTGTTTGTGTCATCT
CTTTATACCTGATGTATAAAGAAAAGCTGGTATTATTCCTACTCAATCTGTTCCAAAAAATTGAGGAGGAGGAAC
TCTTCCCTAATGAGGCCAGCATCATTCTGATACCAAAACCTGGCAGAGACACAACAGAAAAAAGAAAACTTCAGG
CCAATATCCTTGATGAATATAGATGCAAAAATCCTCAACAAAATACTAGCAAACCAAATCCAGCAGCACATCAAA
AAGCTGATCTACTTTGATCAAGTAGGCTTTATCCCTGGGATGCAAGGTTGGTTCAACATACACAAATCAATAAGT
GTGATTCATCACATAAACAGAGCTAAAAACAAAAACCACAAGATTATCTCAATAGGTAGAGAAAAGGTTGTCAAT
AAAATTTAACATCCTCCATGTTAAAAACCTTCAGTAGGTCAGGTGTAGTGACTCACACCTGTAATCCCAGCACTT
TGGGAGGCCAAGGCGGGCATATCTCTTAAGCCCAGGAGTTCAAGACGAGCCTAGGCAGCATGGTGAAACCCCATC
TCTACAAAAAAAAAAAAAAAAAAAAATTAGCTTGGTATGGTGACATGCACCTATAGTCCCAGCTATTCAGGAGGT
TGAGGTGGGAGGATTGTTTGAGCCCGGGAGGCAGAGGTTGGCAGCGAGCTGAGATCATGCCACCGCACTCCAGCC
TGGGCAACGGAGTGAGACCCTGTCTCAAAAAAGAAAAATCACAAACAATCCTAAACAAACTAGGCATTGAAGGAA
CATGCCTCAAAAAAATAAGAACCATCTATGACAGACCCATAGCCAATATCTTACCAAATGGGCAAAAGCTGGAAG
TATTCTCCTTGAGAACCGTAACAAGACAAGGATGTCCACTCTCACCACTCCTTTTCAGCATAGTTCTGGAAGTCC
TAGCCAGAGCAATCAGGAAAGAGAAAGAAAGAAAGACATTCAGATAGGAAGAGAAGAAGTCAAACTATTTCTGTT
TGCAGGCAGTATAATTCTGTACCTAGAAAATCTCATAGTCTCTGCCCAGAAACTCCTAAATCTGTTAAAAATTTC
AGCAAAGTTTTGGCATTCTCTATACTCCAACACCTTCCAAAGTGAGAGCAAAATCAAGAACACAGTCCCATTCAC
AATAGCCGCAAAACGAATAAAATACCTAGGAATCCAGCTAACCAGGGAGGTGAAAGATCTCTATGAGAATTACAA
AACACTGCTGAAAGAAATCAGAGATGACACAAACAAATGGAAATGTTCTTTTTTAACACCTTGCTTTATCTAATT
CACTTATGATGAAGATACTCATTCAGTGGAACAGGTATAATAAGTCCACTCGATTAAATATAAGCCTTATTCTCT
TTCCAGAGCCCAAGAAGGGGCACTATCAGTGCCCAGTCAATAATGACGAAATGCTAATATTTTTCCCCTTTACGG
TTTCTTTCTTCTGTAGTGTGGTACACTCGTTTCTTAAGATAAGGAAACTTGAACTACCTTCCTGTTTGCTTCTAC
ACATACCCATTCTCTTTTTTTGCCACTCTGGTCAGGTATAGGATGATCCCTACCACTTTCAGTTAAAAACTCCTC
CTCTTACTAAATGTTCTCTTACCCTCTGGCCTGAGTAGAACCTAGGGAAAATGGAAGAGAAAAAGATGAAAGGGA
GGTGGGGCCTGGGAAGGGAATAAGTAGTCCTGTTTGTTTGTGTGTTTGCTTTAGCACCTGCTATATCCTAGGTGC
TGTGTTAGGCACACATTATTTTAAGTGGCCATTATATTACTACTACTCACTCTGGTCGTTGCCAAGGTAGGTAGT
ACTTTCTTGGATAGTTGGTTCATGTTACTTACAGATGGTGGGCTTGTTGAGGCAAACCCAGTGGATAATCATCGG
AGTGTGTTCTCTAATCTCACTCAAATTTTTCTTCACATTTTTTGGTTTGTTTTGGTTTTTGATGGTAGTGGCTTA
TTTTTGTTGCTGGTTTGTTTTTTGTTTTTTTTTGAGATGGCAAGAATTGGTAGTTTTATTTATTAATTGCCTAAG
GGTCTCTACTTTTTTTAAAAGATGAGAGTAGTAAAATAGATTGATAGATACATACATACCCTTACTGGGGACTGC
TTATATTCTTTAGAGAAAAAATTACATATTAGCCTGACAAACACCAGTAAAATGTAAATATATCCTTGAGTAAAT
AAATGAATGTATATTTTGTGTCTCCAAATATATATATCTATATTCTTACAAATGTGTTTATATGTAATATCAATT
TATAAGAACTTAAAATGTTGGCTCAAGTGAGGGATTGTGGAAGGTAGCATTATATGGCCATTTCAACATTTGAAC
TTTTTTCTTTTCTTCATTTTCTTCTTTTCTTCAGGAATATTTTTCAAGATGTCTTACACAGAGACACTCTAGTGA
AAGCCTTCCTGGATCAGGTAAATGTTGAACTTGAGATTGTCAGAGTGAATGATATGACATGTTTTCTTTTTTAAT
ATATCCTACAATGCCTGTTCTATATATTTATATTCCCCTGGATCATGCCCCAGAGTTCTGCTCAGCAATTGCAGT
TAAGTTAGTTACACTACAGTTCTCAGAAGAGTCTGTGAGGGCATGTCAAGTGCATCATTACATTGGTTGCCTCTT
GTCCTAGATTTATGCTTCGGGAATTCAGACCTTTGTTTACAATATAATAAATATTATTGCTATCTTTTAAAGATA
TAATAATAAGATATAAAGTTGACCACAACTACTGTTTTTTGAAACATAGAATTCCTGGTTTACATGTATCAAAGT
GAAATCTGACTTAGCTTTTACAGATATAATATATACATATATATATCCTGCAATGCTTGTACTATATATGTAGTA
CAAGTATATATATATGTTTGTGTGTGTATATATATATAGTACGAGCATATATACATATTACCAGCATTGTAGGAT
ATATATATGTTTATATATTAAAAAAAAGTTATAAACTTAAAACCCTATTATGTTATGTAGAGTATATGTTATATA
TGATATGTAAAATATATAACATATACTCTATGATAGAGTGTAATATATTTTTTATATATATTTTAACATTTATAA
AATGATAGAATTAAGAATTGAGTCCTAATCTGTTTTATTAGGTGCTTTTTGTAGTGTCTGGTCTTTCTAAAGTGT
CTAAATGATTTTTCCTTTTGACTTATTAATGGGGAAGAGCCTGTATATTAACAATTAAGAGTGCAGCATTCCATA
CGTCAAACAACAAACATTTTAATTCAAGCATTAACCTATAACAAGTAAGTTTTTTTTTTTTTTTTGAGAAAGGGA
GGTTGTTTATTTGCCTGAAATGACTCAAAAATATTTTTGAAACATAGTGTACTTATTTAAATAACATCTTTATTG
TTTCATTCTTTTAAAAAATATCTACTTAATTACACAGTTGAAGGAAATCGTAGATTATATGGAACTTATTTCTTA
ATATATTACAGTTTGTTATAATAACATTCTGGGGATCAGGCCAGGAAACTGTGTCATAGATAAAGCTTTGAAATA
ATGAGATCCTTATGTTTACTAGAAATTTTGGATTGAGATCTATGAGGTCTGTGACATATTGCGAAGTTCAAGGAA
AATTCGTAGGCCTGGAATTTCATGCTTCTCAAGCTGACATAAAATCCCTCCCACTCTCCACCTCATCATATGCAC
ACATTCTACTCCTACCCACCCACTCCACCCCCTGCAAAAGTACAGGTATATGAATGTCTCAAAACCATAGGCTCA
TCTTCTAGGAGCTTCAATGTTATTTGAAGATTTGGGCAGAAAAAATTAAGTAATACGAAATAACTTATGTATGAG
TTTTAAAAGTGAAGTAAACATGGATGTATTCTGAAGTAGAATGCAAAATTTGAATGCATTTTTAAAGATAAATTA
GAAAACTTCTAAAAACTGTCAGATTGTCTGGGCCTGGTGGCTTATGCCTGTAATCCCAGCACTTTGGGAGTCCGA
GGTGGGTGGATCACAAGGTCAGGAGATCGAGACCATCCTGCCAACATGGTGAAACCCCGTCTCTACTAAGTATAC
AAAAATTAGCTGGGCGTGGCAGCGTGTGCCTGTAATCCCAGCTACCTGGGAGGCTGAGGCAGGAGAATCGCTTGA
ACCCAGGAGGTGTAGGTTGCAGTGAGTCAAGATCGCGCCACTGCACTTTAGCCTGGTGACAGAGCTAGACTCCGT
CTCAAAAAAAAAAAAAAATATCAGATTGTTCCTACACCTAGTGCTTCTATACCACACTCCTGTTAGGGGGCATCA
GTGGAAATGGTTAAGGAGATGTTTAGTGTGTATTGTCTGCCAAGCACTGTCAACACTGTCATAGAAACTTCTGTA
CGAGTAGAATGTGAGCAAATTATGTGTTGAAATGGTTCCTCTCCCTGCAGGTCTTTCAGCTGAAACCTGGCTTAT
CTCTCAGAAGTACTTTCCTTGCACAGTTTCTACTTGTCCTTCACAGAAAAGCCTTGACACTAATAAAATATATAG
AAGACGATACGTGAGTAAAACTCCTACACGGAAGAAAAACCTTTGTACATTGTTTTTTTGTTTTGTTTCCTTTGT
ACATTTTCTATATCATAATTTTTGCGCTTCTTTTTTTTTTTTTTTTTTTTTTTTTTCCATTATTTTTAGGCAGAA
GGGAAAAAAGCCCTTTAAATCTCTTCGGAACCTGAAGATAGACCTTGATTTAACAGCAGAGGGCGATCTTAACAT
AATAATGGCTCTGGCTGAGAAAATTAAACCAGGCCTACACTCTTTTATCTTTGGAAGACCTTTCTACACTAGTGT
GCAAGAACGAGATGTTCTAATGACTTTTTAAATGTGTAACTTAATAAGCCTATTCCATCACAATCATGATCGCTG
GTAAAGTAGCTCAGTGGTGTGGGGAAACGTTCCCCTGGATCATACTCCAGAATTCTGCTCTCAGCAATTGCAGTT
AAGTAAGTTACACTACAGTTCTCACAAGAGCCTGTGAGGGGATGTCAGGTGCATCATTACATTGGGTGTCTCTTT
TCCTAGATTTATGCTTTTGGGATACAGACCTATGTTTACAATATAATAAATATTATTGCTATCTTTTAAAGATAT
AATAATAGGATGTAAACTTGACCACAACTACTGTTTTTTTGAAATACATGATTCATGGTTTACATGTGTCAAGGT
GAAATCTGAGTTGGCTTTTACAGATAGTTGACTTTCTATCTTTTGGCATTCTTTGGTGTGTAGAATTACTGTAAT
ACTTCTGCAATCAACTGAAAACTAGAGCCTTTAAATGATTTCAATTCCACAGAAAGAAAGTGAGCTTGAACATAG
GATGAGCTTTAGAAAGAAAATTGATCAAGCAGATGTTTAATTGGAATTGATTATTAGATCCTACTTTGTGGATTT
AGTCCCTGGGATTCAGTCTGTAGAAATGTCTAATAGTTCTCTATAGTCCTTGTTCCTGGTGAACCACAGTTAGGG
TGTTTTGTTTATTTTATTGTTCTTGCTATTGTTGATATTCTATGTAGTTGAGCTCTGTAAAAGGAAATTGTATTT
TATGTTTTAGTAATTGTTGCCAACTTTTTAAATTAATTTTCATTATTTTTGAGCCAAATTGAAATGTGCACCTCC
TGTGCCTTTTTTCTCCTTAGAAAATCTAATTACTTGGAACAAGTTCAGATTTCACTGGTCAGTCATTTTCATCTT
GTTTTCTTCTTGCTAAGTCTTACCATGTACCTGCTTTGGCAATCATTGCAACTCTGAGATTATAAAATGCCTTAG
AGAATATACTAACTAATAAGATCTTTTTTTCAGAAACAGAAAATAGTTCCTTGAGTACTTCCTTCTTGCATTTCT
GCCTATGTTTTTGAAGTTGTTGCTGTTTGCCTGCAATAGGCTATAAGGAATAGCAGGAGAAATTTTACTGAAGTG
CTGTTTTCCTAGGTGCTACTTTGGCAGAGCTAAGTTATCTTTTGTTTTCTTAATGCGTTTGGACCATTTTGCTGG
CTATAAAATAACTGATTAATATAATTCTAACACAATGTTGACATTGTAGTTACACAAACACAAATAAATATTTTA
TTTAAAATTCTGGAAGTAATATAAAAGGGAAAATATATTTATAAGAAAGGGATAAAGGTAATAGAGCCCTTCTGC
CCCCCACCCACCAAATTTACACAACAAAATGACATGTTCGAATGTGAAAGGTCATAATAGCTTTCCCATCATGAA
TCAGAAAGATGTGGACAGCTTGATGTTTTAGACAACCACTGAACTAGATGACTGTTGTACTGTAGCTCAGTCATT
TAAAAAATATATAAATACTACCTTGTAGTGTCCCATACTGTGTTTTTTACATGGTAGATTCTTATTTAAGTGCTA
ACTGGTTATTTTCTTTGGCTGGTTTATTGTACTGTTATACAGAATGTAAGTTGTACAGTGAAATAAGTTATTAAA
GCATGTGTAAACATTGTTATATATCTTTTCTCCTAAATGGAGAATTTTGAATAAAATATATTTGAAATTTTGCCT
CTTTCAGTTGTTCATTCAGAAAAAAATACTATGATATTTGAAGACTGATCAGCTTCTGTTCAGCTGACAGTCATG
CTGGATCTAAACTTTTTTTAAAATTAATTTTGTCTTTTCAAAGAAAAAATATTTAAAGAAGCTTTATAATATAAT
CTTATGTTAAAAAAACTTTCTGCTTAACTCTCTGGATTTCATTTTGATTTTTCAAATTATATATTAATATTTCAA
ATGTAAAATACTATTTAGATAAATTGTTTTTAAACATTCTTATTATTATAATATTAATATAACCTAAACTGAAGT
TATTCATCCCAGGTATCTAATACATGTATCCAAAGTAAAAATCCAAGGAATCTGAACACTTTCATCTGCAAAGCT
AGGAATAGGTTTGACATTTTCACTCCAAGAAAAAGTTTTTTTTTGAAAATAGAATAGTTGGGATGAGAGGTTTCT
TTAAAAGAAGACTAACTGATCACATTACTATGATTCTCAAAGAAGAAACCAAAACTTCATATAATACTATAAAGT
AAATATAAAATAGTTCCTTCTATAGTATATTTCTATAATGCTACAGTTTAAACAGATCACTCTTATATAATACTA
TTTTGATTTTGATGTAGAATTGCACAAATTGATATTTCTCCTATGATCTGCAGGGTATAGCTTAAAGTAACAAAA
ACAGTCAACCACCTCCATTTAACACACAGTAACACTATGGGACTAGTTTTATTACTTCCATTTTACAAATGAGGA
AACTAAAGCTTAAAGATGTGTAATACACCGCCCAAGGTCACACAGCTGGTAAAGGTGGATTTCATCCCAGACAGT
TACAGTCATTGCCATGGGCACAGCTCCTAACTTAGTAACTCCATGTAACTGGTACTCAGTGTAGCTGAATTGAAA
GGAGAGTAAGGAAGCAGGTTTTACAGGTCTACTTGCACTATTCAGAGCCCGAGTGTGAATCCCTGCTGTGCTGCT
TGGAGAAGTTACTTAACCTATGCAAGGTTCATTTTGTAAATATTGGAAATGGAGTGATAATACGTACTTCACCAG
AGGATTTAATGAGACCTTATACGATCCTTAGTTCAGTACCTGACTAGTGCTTCATAAATGCTTTTTCATCCAATC
TGACAATCTCCAGCTTGTAATTGGGGCATTTAGAACATTTAATATGATTATTGGCATGGTAGGTTAAAGCTGTCA
TCTTGCTGTTTTCTATTTGTTCTTTTTGTTTTCTCCTTACTTTTGGATTTTTTTATTCTACTATGTCTTTTCTAT
TGTCTTATTAACTATACTCTTTGATTTATTTTAGTGGTTGTTTTAGGGTTATACCTCTTTCTAATTTACCAGTTT
ATAACCAGTTTATATACTACTTGACATATAGCTTAAGAAACTTACTGTTGTTGTCTTTTTGCTGTTATGGTCTTA
ACGTTTTTATTTCTACAAACATTATAAACTCCACACTTTATTGTTTTTTAATTTTACTTATACAGTCAATTATCT
TTTAAAGATATTTAAATATAAACATTCAAAACACCCCAATTAAAAGTCAGAGATTGTTAATACCACATGATCTCA
CTTACACACAGAATTGAAAAACTTGGAACTCATAGAAGCAGAGAGTAAAAACATGGTTACCAGGTGCTGGGGAGA
GGCGGTGGGCTGGGGAGATGTTGGTCAAAGTTAGACAGGAGGAATAAGTTCAAGAGATCTATTGTACAACTTATT
CAGTTAGATAGGAGGAATAAGCTAAAGATCAAGAGATCTATTGTACAATGTGACTATAACCAACAACATATATTG
TACACTTGAAAATTGCTAACAGTATCTTTTAAGTGTTCTCTCTACAAATAAATATGTGAGGTAATGTATATATTA
ATTAACTGTAGTCATTTCACAATGTATACTTATTTCAAAACATCATATTGTATGCTATAAATATATACAACTTTT
ATTTTTCAATTTTAGAAATGTCCTTAAAAAATCAGATTTTCAGATCAGATAAAAAAGCAAGACCCAACTATATGC
TGCCAACAGGAAACACACCTTAAAAATAAAGGACGAACAAACAGATTAAAAGTAAAAGGATGGAGAAAAGATACA
TCATATTGGTAATTAGAAGAAAACTGGAGTGACAATATGAAACAAAATAGATTTCAGAGCAAAGAATATTACCAG
GGGTAAAAATGATCATTTTATAATGATAAAAGAGTCAGTTCAGCAAAAGGATATAACAGTCCTAAATGTTTTTTC
ACCTCATAGCTGTGTCAAAATAGATGAAGCAAAAACTGATAGAACTGTAAGAAGTAGACAAGTCCACAATTATGT
TTGGAGATTTTTTTTTTTTTTTTTTTTGTCGCCCAGGCTGGAGTGCAGTGGCAGGATCTCAGCTCACTGCAAGCT
CCGCCTCCCAGGTTCACGCCATTCTCCTGCTTCAGCCTCCCCAGTAGCTGGGACTACAGGCGGCCACCACCACGC
CTGGCTAATTTTTTTGTATTTTTAGTAGAGACGGGGTTTCACCGTGTTAGCCAGGATGGTCTCGATCTCCTGACC
TCGTGATCTGCCTGCCTCGGCCTCCCAAAGTGCTGGGATTACAGGCATGAGCCACTGCACGCAGCCTGGAGATTT
TAATATCCTTTCAATGTTTAGTAGAACAAGAATACACAAAATCAGTAAGGATATAGAAGATTAGAACAAGACTAT
CAAACAATTTGACTTAAATGACATTTGTAGAGCACAGCAGTCCCCAACAACAATAAATCACACATTCTTTCCAAG
AGTACATGAAACATGTACCAAGATAGACCGTATTTTGAGCCATGAAACAAATCTTGATAAATTTAAAAGGATTCA
AGTCATAGAAAATATGTTCTCTGACCACAATGGAATTAAATTATTAACCAATAACAAATATCTGGGAAAACCTCA
AAAACTTGGACACCAGCGCTTTTAAAAGACTAAATAATTTCTAAATTATCTGTGTTGGGGGGAAAAGAGAAATGG
ATTAGAGAGCAAAAAGGGTATCAGAGTGCTGTGGTACGATTTTTATGAAGAGTGGAACAGAATCTGCCTTTGGCG
TTTCCCCACTACAGCCCATTCTTCACATTGATAACAGCATGATCCTTCTAAAATTAAATCTAACGATCACTTCTG
CTTAATGGCTCTCCAACACTTACAGAATTAGGTCCAAAATTCTAGCACAGTTTCTGTTCATCTTTCTAACCTTTC
TTCCCACAGGTCTAGCTAGTACGTATTTCTTTTATTGCATTTATTACACTATTCCTTTGCTTATCTATCTCCCCA
CCTAGGCTAAAGAACAAGATTCTTGTCTTTTTCATTTTTGTGTCTCAGTGCCTAGCATGGTGCCAGGCACACAGC
ATGCTTCCAGTAAATGTTAGCTGGATGGATGTAATGAGTATATTAAATATTAATTTATTTGTTTTTCCCCAAAAA
GAATTATTTCCTGCAAATCAAGGAAATTGCTTTCTTTATATAATCAAAAACTTATTTTCCCAGAAGATTCTTCAT
TAAAAATTAAGCCTATGCACAACCTAGCTCTAAAGTTTCAAAGATTTTAGGCAGCAATTTTTCAATCTTTTTGAA
GTAATACATTTGAATCTTTTCAAATTTCTGTTTCTGCATTTGTGCCACACCATCTCATCTCTTGCTGAAATGTTT
TTGTTAAATTAATTGCTTGATAAATTGCTAAGTACTTTTCATCAGACCAATTAGGACAATAGTAAGTATCCATCT
GTGGAGCGCGGACATTCAAGAAATCTGATCCAGTATTTAGAAAGTCATTCCTGAGCTGAGTTGGCTCAAACTGGC
ACCTTCTGGCATTTGCTTGTGGGTGGGGAATGTGGAATGCTTTGAAAGCTGAATGAGTTTGTCAAGTTTTAAAAT
TCCCTTATGGCTAAAGGAAAACAACATTCATTGTTTAAAAACACCATTGTTTGTTTTTTCTGCTTTTTTGTTCTT
TGGAGCCTGAATCTGCAAAAACACTCACACCCAGCATTTTGCTTCATGTACCACTCCTAAGATGTTTTTAGAGAC
TTGAATAGTGTCTCCGCACTACTTTTTATTGTGATTGTTCAGAATGTTCATAACAAATGGTAAAAAGTCAGTTTT
AGTGCTCAAATTGAGTTTTATGGAGAAAGACCATAATTTATGTTTGTCATTGTAAATTGATAGGAGAATTTTTGG
AAGTTTGCGTCCTAGAACCAGATTTCCAAGGCTCAGATCCTTATTTTCTCACTTCCTAGCTGTGTGACCTTAGAC
AAGGTATTAAACCTGTCTGTGCTGCCTCAGTGTCCTCATCTATTCTTTAAGAGTAAGAATAGAACCTACCCGATA
GAGTCACTTGAAGATTAAGTGGGTTAGTAAATTCAGAATGCTTGGAACAGTAACTAGCACAGAATAAGTGTCCAA
TAAAATTGGGTTGCAGCTATTATCAGTATTATTCCTGTCATAATCATCATCACCATTAAGCAATTAAATGTAGAG
TTCCAAAATTTGATTATGAAACTACAGTTATACAGCCATGATTCCCGGTGATACCACGTCAGTAACAAGATTATT
TCCTTAGCTTGAGCCAGTCACTACCTCATTGCATGTGGCAGAGTGTGTTGCCGTAGGCAAATGTCATTGTAGGGA
ATGAAAAAAAAATTGCCTGTGAGCTGCTCTCCAGAGGCCTCATCCCATTTTCCCATCGTCCACTTTACTCCATCT
CCACTGCCACTATTAGGACCTTATCATTTCTTGTCTAGATTAATTCAACAGCTTCCTTCCTTCTAGTCTCCATGA
TTTCACCCACTAGCCATCCCCTCCCCTTTGCCCAATTTTCTCCATTTATGGTAGAGTGATCTTTCTAATAGGAAA
CTCCTGACTTGCCTTAAAAAGCCCTCATTGAGGCCGGACGTGGTGGCTCATGCCTGTAATCCCAGCACTTTGGGA
GGCCGAGGCAGGTGGATCACGAGGTCAAGAGATTGAGACCATCGTGACTAACACAGTGAAACCCCATCTGTACTA
AAAATACAAGAAATTAGCCAGGCGTGGTGGCGGGTGCCTGTAGTCGCAGCTACTTGGGAGGCTGAGGCAGGAGAA
TGGCGTGAACCCGGGAGGCAGAGCTTGCAGTGAGCCGAGATTGCGCCACTGCACTCCAGCCTGGGCGACAGAGTG
AGACTCCGTCTCAAAAAAAAAAAGCCCTCATTGACAACCTTCAACCCACAATCCATGGTGAAGCACAGGAGCCTT
GGGGATCTGCCCCCAGCACACCTCTCCACCCTTGTCTCTCACTGCTCCTGCCTTCATGGAGAGCCCTGATGAACT
ATTTGTAGTTTCCCCTGACTCACCTTGCTGTTACTGGGCCTGTGTGCGTGTTGCTCCCACTACCTGCAATACGCT
TACCCACTTCACCTGGGTGAACTTTACTTAGGATTCACCTTAGGTGGGCATCATGTTCTTCCAGGCCCCTCCTCT
AACTTTTAGTTGAGAGTATTCCAGACTTAAGGCTCCATGGGATAGGGATCTTGTCTATGCACCAGCTTATTCCCA
ACTGCCTGGCACGTAATGCATTTATTAAATATATATTGAATTGATTACCCTACTTGGGGCTCTTGTTTGCTTCTA
CACTTACAGTTCTAGCATAGCACTTAACTCATTATCATGCATCATTATTATGGGTTTGTTTTGTCTCCCATTAGA
CTGTGAGCTCCACAAGGCTGTGTCCTTGTCTTATACATCATTGTATTTCCAGCTTCCAACATAGTGCTTGCCATG
ACACAGGAAGTCAGTAAGCTCTGAATGAATGAATAGTATCTACATACCATTAATCTGAGGTTTAAAGTTTCCCCA
AATTCTGAAGCAAGGGGATTTACGGACTTCCCTGACAATTTTTGGATGTCATCCCAATGATACCACTAACATTTT
AAGGGACAGCTTGCATATATACATTTTTCTGGATGGCAGTTTTTTTTCCCACAGGCTTCATCAGATATTTCTCCA
TAGCCTTCCTCAGATTCTCAAAGGGGTCTCTGATTCCCCCAAAAGATAAGAAACTGTCATAAAAAATTATTTCTA
AATATCAATTGTTAAATAAAATGTTTGCAAAGCAGCCTGATGAATCATTTCAGGCCACTTGACCCCGATGAGTTA
GAGAGTTTGTGCTCTGCAATCTGACTGCTTCCAGCAGTCTCACTGCTGCTGGACTGTGGCACTTCCAATTGGCAG
CAGGGCAAGTTTCTTCTGGATGAATATTCTGTCATAGGGGTCCCCCTTCCACACATACCTGTAGGAGCAGTTTGA
AACTCATATGCATGGTCTTCCTGGTTCTAGGCACATGAGTCATTTAAGCTGCTGGAGCCAGGACCAGCTAGTATG
CTAGCCCGGCATTCAGAAAGTTAAAATTTGGGGTCAAAACTGAGAACCTTCTTTGATCCACCTTGGCCAGACATT
TTCTCTGGCTTCCATTAATAGCCTCAACATTTTTTTTTTTTCTGGCCTAGACCCACACAGGCAAGAGACCAGAGC
TTCTCTAAGGAGCTAAGGGAAAGCACATTTTAAAAATAACTTGAGCAAATGAATTCATCTGGCAAAAGCAACCCC
ACTACGTAAAATAAACCTTTTTAGTTTCGCAATAGCAGTTCCTGAAAATGTAAACAACCTCAGGGTCTACATGCA
CTGAATCATTTGCTGAACAGAAAGTCCCTGGTCCAAATTCTGCAAGAATAAACACCTTACAAAACTAGGGGTCAA
TGACCTTCATATGGGAACAAGGAGGGTGTGGGGGGCAGCAACCCACCCTGAGGACAATGAGAAAGTCTTGAGACT
TGATATTCAAAATGCTGGCTTTCTAAACCAAAAACTGGCATGAGTGGAGGGAGAAGGGGAGGGTGGGCACAGTCT
ATGCCTCAGGCTCTTGCTCAGACCCTACCAGGCCCCTGCCTTCCCTAGGGAAAGCGAGAGTCTACTCACTGTCAT
GAAGCCAGAGGAAGGCCCTGCAGGTTTCACTGTGTGTTCTGTTGACAAGATGATGGTTCCATTGAAACTGTAATA
ACATACTTGGCCAACTAAGCCCATACGATCGTAGTAACTTTGTACCCAGTCCTAGCTTTTCAAACATAATGATAA
TATGTTCTTTCTAATGTGGCCCATACTGTTCTAATGAACTTATGCTGAGTTTTTCTGAGTACTAGAATAATATTC
GCCATAAATAATAGATATAATTATTCTCATTTAATATTTGCGTAGCTCTTCTTTAAAGCAGAAAGTATTTTCTCA
TTCCTTACTAGAACCTTTCTGTGTGAGGAGCACTGAGCTAGAACCCATATCTTAGAATGGTCAGAATTTGGAGAA
ATTCAGGGAAAAGGCACTGGACTCATTTTTAAAGACTAGAAAATGCAACCTCCAGAAAAAGATTCAAGAGTTTTT
TACTCCCAGAGATGTAGGAAAGATTGGAGTAAATCTTAATATTATATTTCAGGTAAACAAAGGATCACTGTCAAA
ATAGCAGCATTTATTGAGTAATGGCTGTGTGCCAGGTACTTTACAGTTTCACATTTAACCCTCATAATAACCTTG
TAAAGTGGATATCCCCTCAGTACATGATGAGAACACTGAAGCTTAGGTTAAATGATTGTCCAAATCGGACAATCA
TTTTCAAAATCTCCCCCTTTTTTTCTCCTTTCTTATCTGCAAGGCAGATTGCCCTTTCCCTTTCAGTGAAACTTG
TGCATGACCACATGACTCTCTTTGGCCAATGAAACATGAACAAGCAGCGTTTATCACTTTCAGATGGAAGGCTTT
GCATGAGCTTTGCCTCCTTTTCACTCTGCCACAGTGGCCACTAACATTCCAGATAGTGGCGCTCTGCAGGCTAGG
TCCTATAGTGGGAGCTATGGGCAGAGCCCCCTTTCCCACCCCCATCAAGATGTGCATGCTGCATAAGCCATGCAT
TAATCTTTGCAGTTTTAAGCCACTAAGTTTTGGAGTTATATTAATCATTAATCATGGTTCTCAAGAGAAACAGAG
TGGGGGAGTGGTATTCATTATGGGAATTGGCTTACATGATTATGGAAGCTGAGTAGTCCCCCAGTCTGCTGTTTT
TGAGCTGGAGAACTAGAGGAGCCAGTGGTATAATTCAGCCCAAGCCTGAAGGCCTGAGAAATGGGATGGGGGAAT
TGGGAGGGTGGGTGTGCTAGGGTAGGATAAGTCCTGAAGTTCAAAGGCCAGCCAGAAGGTGGATGTTTCAGCACC
AGAAGAGAGAGCAAATTCGCTTTTCTTCTGCCTTTTTGTCCTCTCTGGGCCCTCAATGGATTGGATGATGCCCTC
CCACATTGGTAAGGGTGGATCTTCTATACTCAGTCTGCTAATTTCTTCCAGAAACATCTTCACAGACACATCCAG
AAATAATGTTTTACCAGCTATCTCGGTATCCCTTAGCCTAGTCCATATTTAAAAATTAATGATCACAAGCAGTTG
TTTGTTTCCACAGCAAAACCTGGGTGACAGACCAAGTGACCCAGATGACTAGAATTTGACCTTCTTTTGTTGCCC
ACACCATACTCTGAACTAACATGCTGTGCTGCCTTCCAAGTGGAGAATGATGGCTAAGTATCTTCTACCTAATTT
GAGTCACAGAAAAAAAAAAAAAAGGTTATTAACTGCAGTGACAAGAATTGTGATTCCCCAGGGGGCAGATCAAGA
CTGATAGATAAGAGAAGTGAGGAACATCTGGGGAATGTCCATTGAAAATTTACTCAGAAGAGAAGAATAATTAAT
ATAATAATATGATATATTGAATTATAATAAATAATATTTTGATGTATTTCCTTCCAGGCATGTTTAAGTTATAGA
CTTTGAGTATATTTTCTCAAAGGGGGTTCTATGTAAGAGACTATTTCTTAATATAGTTCCTAGCTTGGAATTGCT
CTTGCTGGTTTAAGCTGAGCTTATTTTATTACAGACTTCACAACAATAACGTTTTCCTTCACTAGTCAGTACACA
AGATGGTCTTCATTTCCAGTTTGGAATCCCACACTATCAGAGCCTGAGACAAGGACTAGTATGCAGTTAGTTTGT
TTGGGAGGTGATTCCAGGAAGTGGGAATGAGAGATCAGTCAGCCTGCAACACGAAGGAGGAAAAGTCAATATAAG
GATGAATTTGGCAATTGGCCGTTTCATGCAACTGGGGCTAAATTTTGCTTGGCTCTCTAAGAAATGTAAAGAATG
CCTCCCGTAATTGCTCACCTCAAGTATTTATTCATTGGCTCTCATGCTCCATTGGTTGTCCATGAGAACTTTAGC
CCTCCCTCGCTGCAGCACAGACACTGTGCTTTCTCCTAGGCTGAGCAAGCTCCTGCATCTGTGGAAACCGTCCCG
GGGCAGATAGTGAAATAATGACTGCTGCGTGCTTGAGATCTGGGAAAGAGGCCACATCATAAGTGCACTGAAATC
AGAGATGTGTCAAGAGATGTGACACAGGGCATCTGAGGTGTCTACTGCACCAGCTATAACTCCCTAAACGCTAAT
CTCAGTTCTTACAGAGGGGATGGATGCAAGGGAACAGTCATGATTGAGAGCACCGAAGAAGCTCTGTATGAACCT
TAGGCAAGTTTCCTAATCTCCAAAATGAAGGTAATAATACCCACCATCCAAGATCTTCGGGAGGAATAGATGAAC
TAATGTATGTGAAAATGTCCAGCACAGGTCCTAACCCATAGTAGGTGCTCACCAAATGTTAGTTCCCTGCCCTCC
ACGTTGTGTGTATCCGGAGCTGCACTAGATGCTGAGGCAAATGGTCTCAAATGTACTTTAACACTTAATGACTGA
GATTTTTTCTGAGCTGCCTACAGGTTATTGACTATATTCATTATTAATAATAATATATATGGCCACTTCAGGCAA
CTGGGGCTAAATTTTGCTTGGCTCTCTAAGAAATGTAAAGAATGCCTCCTGTAATTGCTCACCTCAAGTATTTAT
TCATTGGCTCTCGTGCTTTATTGGTTGTCCCTGAGGACTTTAGCCCTCTCTCACTGCAGCACAGACACTGTGCTT
TCTCCTAGTTTCTGTGGCAAGTGACAGGAGCCCACCTCAAACTAAAGCAAAAGGGACTTCATTGGCTCTTGTAGC
TAGGAATTCCAGGGTTGGCACTGGCTTTGGGCACTACTGGATGCAGGAATTCAAACAATGTCTTCAACTCTTTCT
TTTGGTGTTTCTCTCAGCTGTGCTTCTCTTGTCGTTTCTTTTTCCCATTTTACAGATAAGTTCATCCGTAACTGA
GAGAGGTGAAAAGGGGATGGCTGCAGAGAACTCTGGCTTATATCATCCTTGCTTGCTGACCTCAAGGTCCATGTA
TAAATTCTCAGAGAAGAAGCCCTCTGGTTGGTGATGCTTGGAACATGCCCTGGAGGGTGGGCCCCTTGAAGTGGA
GCTTGCTGGAACCACATGGGCTGGAGCAAGGCGCTAGGGCCAGAAGAGAGAGGTAGGCAGGGCTGCTGGCCAGGC
ACTCTTCACCAAGACAAGGCAAGAGGAGGGGCATGATTGAGGCAGTGATACAGAAAGCAGACAGTAGAGGTCGTG
GCAAGTGTGCCGTTACTTGCTACCTGTGGTTGATGGGAGAGTCACACCACATTTAGGAGGAGAGAATCCATTTGC
CACTTCTGACAATGCCACAAGAATCACATATTTCATCCAGAGGTTGAATTTGGCCCATGCTGAGCTTTAAAATAC
AGAGCTGTCTTGGAACAATGGCTCAGTACATTCATTTGGTGTCCAACAAAGCCTGCCTCTGTTGCCTTCCCTCTC
TCTGTGTGCCCTTCAAGATCTTCATTGTGCTTTGGGGAGAGAAAGAGAAAATGTCATATCAGGGTAGCTCACCCC
ATGTGTCCTGGACTCAGGAAAAGAGTATCTTATCACCTTACTCTTTTGTTATTATAAAAAATAAAGTTGAACGTC
TTCAAATAAAATAAAGAAGTATAGAAAAAATTTTAAATTAACCTGTTATGATTCTACCTAGAGAACCATTGTCAA
CATCTTGGTATATGTACTTCCAGATACTTTCCTATGAATATATACATTGTAGATTTTTTAATATTAAAAGGCTAT
CATGCTGCTTTGTATACAGGCTTTCTTTACTGATATGTAATATAATACACAGACAAATATACAAATCCTAAGCCA
TCAACTCATTGAATTTTTATTCATTGTTTTTAATACCTGCATTGTGTTCCATTGTTAGGCTATGTCACAACATAT
TTAATTAAGCCCCTATTGATGAATATTAATTTACTCTATTTGCCAGTTCATTCCAGTCCAACATTTATTGAGTGT
CTACTTACGGGCCAGGCACTCTTGTATTCATCAAGATCACCACATTATCTGTATCAGTTATTTATTGCCACAATA
AAACTGCATAACAAATCACTCCAAAATGTAGCACCTTAAAACTACAACTACTTATTATTTCTCAAGAGTCAATGG
GTCAGCTGAGCAGTTCTGCCGATAGGGGTCAAGGTCAACACATTTCAACTAGACTACTTGTAAAAAAGAATGAGT
GTCTGGGTAGGTGTGTTCTTCTAAAAATAAAACAAGGAATGAGGAAATTGCAGGTAGGATAAGAGGGGTGGTTGG
CAACCAAACCCCACAAAAGGCAGACAAATTTTAAGGAAACATAATGCCAGACTCCTATGTCATCATCCAAGTAGA
TGCAGTGAAGTATAACCTGGGGCGTAGTAGGGTAGGAGTGGGGAGAGCAGAGGAGAAGGAAGGGAGATTGCTTTT
CATCACTTTTGGATTCCCTAATAACAGACATGACTGCCAGTATTAAAATTTAACAAAGGATATCTGATCATTAAT
TTTCCTGTATAAGTCACTGGTGATCTTCAACATCTCTCCCTCCCTTCCTCCCTTCCTTCCTCCCACCCTCCCTTC
CTTCCTTCTTTCCTCTTTTGCTTTCAACTTCCTTTTCTCGTTTCCTTTTGCTTTCTTTCTCTTCTCCCTTTTTTC
TGTCACTCTGGGCGTATGTAGTAGTGTAAAAAGGTTGACAGAGAAATCAAATATAACAGGAGCAGGGCCCTGAGA
AAAGCACCTGGCATCCTGTAGGCAAACCATTGTTTCTAAAAGAAGGGACTGAGAGATTGAGGAGCTCAGGACATT
GCCAAATGAACAAGGCAAGCACATTTATTCAGTACCAAACAAACGGAAAACGGCCTTTCCAAATAACTGACCTAT
AAAACAGCCTTTTCACAAGAGTACCGTAATTACTGGCCAACAGCAACAATGAAAAACAACTCCCAAACAAAGAAA
TATTTCTGGATTAAAAGCCATGAGATCTGGATTCTAACAAGCTGTGCTCCTCAAACTACAAGTACAAAATCTGGC
TCTAAACTAACAAGCTATGAGCCTCAAACTGATGACTGGCATGTTTGGGTCTCCATCTCCTTCTTGGGGGTTGGG
GTCTTAGAGACCCTTTTCCACGCCCTGATTCTCTTACTAGTGTGTATGCTTTCCTTTTGACTTCTCATGCTGACC
GTCTGAGCAGGAGTGAGAAGCAATTTCAAAGGAAAACATCGTTTATCATCTGCTGAAAGAAACCAAAAAGAACAC
AGGAAAACAAAAAGACAAGGAAAGGGAATGAAAATGTAATTCATTTTATTAAAAAGAAGAATTATTCTTCTGGGA
CACTGGATAGAAACCTTAATGAGTTACCTAGCTATCATAAATCCTCTAACAGAGAAGAGAAGAGAAAGAAACAAA
GACGGAAGAGGGCAGGATAAAAGAAAGAAAAAAGGAAGGGAAAAATGAAGGAAGGAAGTTATCTATTCATTTCTA
CAGAGACTCTGCTGAGCAGTAGACAAGAAGACTTGGGAAAAATTTAACTGAAACTTTTCCAAAAATCTTTTCAGA
GG
SEQ ID NO: 16
Reverse Comlement of SEQ ID NO: 15
CCTCTGAAAAGATTTTTGGAAAAGTTTCAGTTAAATTTTTCCCAAGTCTTCTTGTCTACTGCTCAGCAGAGTCTC
TGTAGAAATGAATAGATAACTTCCTTCCTTCATTTTTCCCTTCCTTTTTTCTTTCTTTTATCCTGCCCTCTTCCG
TCTTTGTTTCTTTCTCTTCTCTTCTCTGTTAGAGGATTTATGATAGCTAGGTAACTCATTAAGGTTTCTATCCAG
TGTCCCAGAAGAATAATTCTTCTTTTTAATAAAATGAATTACATTTTCATTCCCTTTCCTTGTCTTTTTGTTTTC
CTGTGTTCTTTTTGGTTTCTTTCAGCAGATGATAAACGATGTTTTCCTTTGAAATTGCTTCTCACTCCTGCTCAG
ACGGTCAGCATGAGAAGTCAAAAGGAAAGCATACACACTAGTAAGAGAATCAGGGCGTGGAAAAGGGTCTCTAAG
ACCCCAACCCCCAAGAAGGAGATGGAGACCCAAACATGCCAGTCATCAGTTTGAGGCTCATAGCTTGTTAGTTTA
GAGCCAGATTTTGTACTTGTAGTTTGAGGAGCACAGCTTGTTAGAATCCAGATCTCATGGCTTTTAATCCAGAAA
TATTTCTTTGTTTGGGAGTTGTTTTTCATTGTTGCTGTTGGCCAGTAATTACGGTACTCTTGTGAAAAGGCTGTT
TTATAGGTCAGTTATTTGGAAAGGCCGTTTTCCGTTTGTTTGGTACTGAATAAATGTGCTTGCCTTGTTCATTTG
GCAATGTCCTGAGCTCCTCAATCTCTCAGTCCCTTCTTTTAGAAACAATGGTTTGCCTACAGGATGCCAGGTGCT
TTTCTCAGGGCCCTGCTCCTGTTATATTTGATTTCTCTGTCAACCTTTTTACACTACTACATACGCCCAGAGTGA
CAGAAAAAAGGGAGAAGAGAAAGAAAGCAAAAGGAAACGAGAAAAGGAAGTTGAAAGCAAAAGAGGAAAGAAGGA
AGGAAGGGAGGGTGGGAGGAAGGAAGGGAGGAAGGGAGGGAGAGATGTTGAAGATCACCAGTGACTTATACAGGA
AAATTAATGATCAGATATCCTTTGTTAAATTTTAATACTGGCAGTCATGTCTGTTATTAGGGAATCCAAAAGTGA
TGAAAAGCAATCTCCCTTCCTTCTCCTCTGCTCTCCCCACTCCTACCCTACTACGCCCCAGGTTATACTTCACTG
CATCTACTTGGATGATGACATAGGAGTCTGGCATTATGTTTCCTTAAAATTTGTCTGCCTTTTGTGGGGTTTGGT
TGCCAACCACCCCTCTTATCCTACCTGCAATTTCCTCATTCCTTGTTTTATTTTTAGAAGAACACACCTACCCAG
ACACTCATTCTTTTTTACAAGTAGTCTAGTTGAAATGTGTTGACCTTGACCCCTATCGGCAGAACTGCTCAGCTG
ACCCATTGACTCTTGAGAAATAATAAGTAGTTGTAGTTTTAAGGTGCTACATTTTGGAGTGATTTGTTATGCAGT
TTTATTGTGGCAATAAATAACTGATACAGATAATGTGGTGATCTTGATGAATACAAGAGTGCCTGGCCCGTAAGT
AGACACTCAATAAATGTTGGACTGGAATGAACTGGCAAATAGAGTAAATTAATATTCATCAATAGGGGCTTAATT
AAATATGTTGTGACATAGCCTAACAATGGAACACAATGCAGGTATTAAAAACAATGAATAAAAATTCAATGAGTT
GATGGCTTAGGATTTGTATATTTGTCTGTGTATTATATTACATATCAGTAAAGAAAGCCTGTATACAAAGCAGCA
TGATAGCCTTTTAATATTAAAAAATCTACAATGTATATATTCATAGGAAAGTATCTGGAAGTACATATACCAAGA
TGTTGACAATGGTTCTCTAGGTAGAATCATAACAGGTTAATTTAAAATTTTTTCTATACTTCTTTATTTTATTTG
AAGACGTTCAACTTTATTTTTTATAATAACAAAAGAGTAAGGTGATAAGATACTCTTTTCCTGAGTCCAGGACAC
ATGGGGTGAGCTACCCTGATATGACATTTTCTCTTTCTCTCCCCAAAGCACAATGAAGATCTTGAAGGGCACACA
GAGAGAGGGAAGGCAACAGAGGCAGGCTTTGTTGGACACCAAATGAATGTACTGAGCCATTGTTCCAAGACAGCT
CTGTATTTTAAAGCTCAGCATGGGCCAAATTCAACCTCTGGATGAAATATGTGATTCTTGTGGCATTGTCAGAAG
TGGCAAATGGATTCTCTCCTCCTAAATGTGGTGTGACTCTCCCATCAACCACAGGTAGCAAGTAACGGCACACTT
GCCACGACCTCTACTGTCTGCTTTCTGTATCACTGCCTCAATCATGCCCCTCCTCTTGCCTTGTCTTGGTGAAGA
GTGCCTGGCCAGCAGCCCTGCCTACCTCTCTCTTCTGGCCCTAGCGCCTTGCTCCAGCCCATGTGGTTCCAGCAA
GCTCCACTTCAAGGGGCCCACCCTCCAGGGCATGTTCCAAGCATCACCAACCAGAGGGCTTCTTCTCTGAGAATT
TATACATGGACCTTGAGGTCAGCAAGCAAGGATGATATAAGCCAGAGTTCTCTGCAGCCATCCCCTTTTCACCTC
TCTCAGTTACGGATGAACTTATCTGTAAAATGGGAAAAAGAAACGACAAGAGAAGCACAGCTGAGAGAAACACCA
AAAGAAAGAGTTGAAGACATTGTTTGAATTCCTGCATCCAGTAGTGCCCAAAGCCAGTGCCAACCCTGGAATTCC
TAGCTACAAGAGCCAATGAAGTCCCTTTTGCTTTAGTTTGAGGTGGGCTCCTGTCACTTGCCACAGAAACTAGGA
GAAAGCACAGTGTCTGTGCTGCAGTGAGAGAGGGCTAAAGTCCTCAGGGACAACCAATAAAGCACGAGAGCCAAT
GAATAAATACTTGAGGTGAGCAATTACAGGAGGCATTCTTTACATTTCTTAGAGAGCCAAGCAAAATTTAGCCCC
AGTTGCCTGAAGTGGCCATATATATTATTATTAATAATGAATATAGTCAATAACCTGTAGGCAGCTCAGAAAAAA
TCTCAGTCATTAAGTGTTAAAGTACATTTGAGACCATTTGCCTCAGCATCTAGTGCAGCTCCGGATACACACAAC
GTGGAGGGCAGGGAACTAACATTTGGTGAGCACCTACTATGGGTTAGGACCTGTGCTGGACATTTTCACATACAT
TAGTTCATCTATTCCTCCCGAAGATCTTGGATGGTGGGTATTATTACCTTCATTTTGGAGATTAGGAAACTTGCC
TAAGGTTCATACAGAGCTTCTTCGGTGCTCTCAATCATGACTGTTCCCTTGCATCCATCCCCTCTGTAAGAACTG
AGATTAGCGTTTAGGGAGTTATAGCTGGTGCAGTAGACACCTCAGATGCCCTGTGTCACATCTCTTGACACATCT
CTGATTTCAGTGCACTTATGATGTGGCCTCTTTCCCAGATCTCAAGCACGCAGCAGTCATTATTTCACTATCTGC
CCCGGGACGGTTTCCACAGATGCAGGAGCTTGCTCAGCCTAGGAGAAAGCACAGTGTCTGTGCTGCAGCGAGGGA
GGGCTAAAGTTCTCATGGACAACCAATGGAGCATGAGAGCCAATGAATAAATACTTGAGGTGAGCAATTACGGGA
GGCATTCTTTACATTTCTTAGAGAGCCAAGCAAAATTTAGCCCCAGTTGCATGAAACGGCCAATTGCCAAATTCA
TCCTTATATTGACTTTTCCTCCTTCGTGTTGCAGGCTGACTGATCTCTCATTCCCACTTCCTGGAATCACCTCCC
AAACAAACTAACTGCATACTAGTCCTTGTCTCAGGCTCTGATAGTGTGGGATTCCAAACTGGAAATGAAGACCAT
CTTGTGTACTGACTAGTGAAGGAAAACGTTATTGTTGTGAAGTCTGTAATAAAATAAGCTCAGCTTAAACCAGCA
AGAGCAATTCCAAGCTAGGAACTATATTAAGAAATAGTCTCTTACATAGAACCCCCTTTGAGAAAATATACTCAA
AGTCTATAACTTAAACATGCCTGGAAGGAAATACATCAAAATATTATTTATTATAATTCAATATATCATATTATT
ATATTAATTATTCTTCTCTTCTGAGTAAATTTTCAATGGACATTCCCCAGATGTTCCTCACTTCTCTTATCTATC
AGTCTTGATCTGCCCCCTGGGGAATCACAATTCTTGTCACTGCAGTTAATAACCTTTTTTTTTTTTTTCTGTGAC
TCAAATTAGGTAGAAGATACTTAGCCATCATTCTCCACTTGGAAGGCAGCACAGCATGTTAGTTCAGAGTATGGT
GTGGGCAACAAAAGAAGGTCAAATTCTAGTCATCTGGGTCACTTGGTCTGTCACCCAGGTTTTGCTGTGGAAACA
AACAACTGCTTGTGATCATTAATTTTTAAATATGGACTAGGCTAAGGGATACCGAGATAGCTGGTAAAACATTAT
TTCTGGATGTGTCTGTGAAGATGTTTCTGGAAGAAATTAGCAGACTGAGTATAGAAGATCCACCCTTACCAATGT
GGGAGGGCATCATCCAATCCATTGAGGGCCCAGAGAGGACAAAAAGGCAGAAGAAAAGCGAATTTGCTCTCTCTT
CTGGTGCTGAAACATCCACCTTCTGGCTGGCCTTTGAACTTCAGGACTTATCCTACCCTAGCACACCCACCCTCC
CAATTCCCCCATCCCATTTCTCAGGCCTTCAGGCTTGGGCTGAATTATACCACTGGCTCCTCTAGTTCTCCAGCT
CAAAAACAGCAGACTGGGGGACTACTCAGCTTCCATAATCATGTAAGCCAATTCCCATAATGAATACCACTCCCC
CACTCTGTTTCTCTTGAGAACCATGATTAATGATTAATATAACTCCAAAACTTAGTGGCTTAAAACTGCAAAGAT
TAATGCATGGCTTATGCAGCATGCACATCTTGATGGGGGTGGGAAAGGGGGCTCTGCCCATAGCTCCCACTATAG
GACCTAGCCTGCAGAGCGCCACTATCTGGAATGTTAGTGGCCACTGTGGCAGAGTGAAAAGGAGGCAAAGCTCAT
GCAAAGCCTTCCATCTGAAAGTGATAAACGCTGCTTGTTCATGTTTCATTGGCCAAAGAGAGTCATGTGGTCATG
CACAAGTTTCACTGAAAGGGAAAGGGCAATCTGCCTTGCAGATAAGAAAGGAGAAAAAAAGGGGGAGATTTTGAA
AATGATTGTCCGATTTGGACAATCATTTAACCTAAGCTTCAGTGTTCTCATCATGTACTGAGGGGATATCCACTT
TACAAGGTTATTATGAGGGTTAAATGTGAAACTGTAAAGTACCTGGCACACAGCCATTACTCAATAAATGCTGCT
ATTTTGACAGTGATCCTTTGTTTACCTGAAATATAATATTAAGATTTACTCCAATCTTTCCTACATCTCTGGGAG
TAAAAAACTCTTGAATCTTTTTCTGGAGGTTGCATTTTCTAGTCTTTAAAAATGAGTCCAGTGCCTTTTCCCTGA
ATTTCTCCAAATTCTGACCATTCTAAGATATGGGTTCTAGCTCAGTGCTCCTCACACAGAAAGGTTCTAGTAAGG
AATGAGAAAATACTTTCTGCTTTAAAGAAGAGCTACGCAAATATTAAATGAGAATAATTATATCTATTATTTATG
GCGAATATTATTCTAGTACTCAGAAAAACTCAGCATAAGTTCATTAGAACAGTATGGGCCACATTAGAAAGAACA
TATTATCATTATGTTTGAAAAGCTAGGACTGGGTACAAAGTTACTACGATCGTATGGGCTTAGTTGGCCAAGTAT
GTTATTACAGTTTCAATGGAACCATCATCTTGTCAACAGAACACACAGTGAAACCTGCAGGGCCTTCCTCTGGCT
TCATGACAGTGAGTAGACTCTCGCTTTCCCTAGGGAAGGCAGGGGCCTGGTAGGGTCTGAGCAAGAGCCTGAGGC
ATAGACTGTGCCCACCCTCCCCTTCTCCCTCCACTCATGCCAGTTTTTGGTTTAGAAAGCCAGCATTTTGAATAT
CAAGTCTCAAGACTTTCTCATTGTCCTCAGGGTGGGTTGCTGCCCCCCACACCCTCCTTGTTCCCATATGAAGGT
CATTGACCCCTAGTTTTGTAAGGTGTTTATTCTTGCAGAATTTGGACCAGGGACTTTCTGTTCAGCAAATGATTC
AGTGCATGTAGACCCTGAGGTTGTTTACATTTTCAGGAACTGCTATTGCGAAACTAAAAAGGTTTATTTTACGTA
GTGGGGTTGCTTTTGCCAGATGAATTCATTTGCTCAAGTTATTTTTAAAATGTGCTTTCCCTTAGCTCCTTAGAG
AAGCTCTGGTCTCTTGCCTGTGTGGGTCTAGGCCAGAAAAAAAAAAAATGTTGAGGCTATTAATGGAAGCCAGAG
AAAATGTCTGGCCAAGGTGGATCAAAGAAGGTTCTCAGTTTTGACCCCAAATTTTAACTTTCTGAATGCCGGGCT
AGCATACTAGCTGGTCCTGGCTCCAGCAGCTTAAATGACTCATGTGCCTAGAACCAGGAAGACCATGCATATGAG
TTTCAAACTGCTCCTACAGGTATGTGTGGAAGGGGGACCCCTATGACAGAATATTCATCCAGAAGAAACTTGCCC
TGCTGCCAATTGGAAGTGCCACAGTCCAGCAGCAGTGAGACTGCTGGAAGCAGTCAGATTGCAGAGCACAAACTC
TCTAACTCATCGGGGTCAAGTGGCCTGAAATGATTCATCAGGCTGCTTTGCAAACATTTTATTTAACAATTGATA
TTTAGAAATAATTTTTTATGACAGTTTCTTATCTTTTGGGGGAATCAGAGACCCCTTTGAGAATCTGAGGAAGGC
TATGGAGAAATATCTGATGAAGCCTGTGGGAAAAAAAACTGCCATCCAGAAAAATGTATATATGCAAGCTGTCCC
TTAAAATGTTAGTGGTATCATTGGGATGACATCCAAAAATTGTCAGGGAAGTCCGTAAATCCCCTTGCTTCAGAA
TTTGGGGAAACTTTAAACCTCAGATTAATGGTATGTAGATACTATTCATTCATTCAGAGCTTACTGACTTCCTGT
GTCATGGCAAGCACTATGTTGGAAGCTGGAAATACAATGATGTATAAGACAAGGACACAGCCTTGTGGAGCTCAC
AGTCTAATGGGAGACAAAACAAACCCATAATAATGATGCATGATAATGAGTTAAGTGCTATGCTAGAACTGTAAG
TGTAGAAGCAAACAAGAGCCCCAAGTAGGGTAATCAATTCAATATATATTTAATAAATGCATTACGTGCCAGGCA
GTTGGGAATAAGCTGGTGCATAGACAAGATCCCTATCCCATGGAGCCTTAAGTCTGGAATACTCTCAACTAAAAG
TTAGAGGAGGGGCCTGGAAGAACATGATGCCCACCTAAGGTGAATCCTAAGTAAAGTTCACCCAGGTGAAGTGGG
TAAGCGTATTGCAGGTAGTGGGAGCAACACGCACACAGGCCCAGTAACAGCAAGGTGAGTCAGGGGAAACTACAA
ATAGTTCATCAGGGCTCTCCATGAAGGCAGGAGCAGTGAGAGACAAGGGTGGAGAGGTGTGCTGGGGGCAGATCC
CCAAGGCTCCTGTGCTTCACCATGGATTGTGGGTTGAAGGTTGTCAATGAGGGCTTTTTTTTTTTGAGACGGAGT
CTCACTCTGTCGCCCAGGCTGGAGTGCAGTGGCGCAATCTCGGCTCACTGCAAGCTCTGCCTCCCGGGTTCACGC
CATTCTCCTGCCTCAGCCTCCCAAGTAGCTGCGACTACAGGCACCCGCCACCACGCCTGGCTAATTTCTTGTATT
TTTAGTACAGATGGGGTTTCACTGTGTTAGTCACGATGGTCTCAATCTCTTGACCTCGTGATCCACCTGCCTCGG
CCTCCCAAAGTGCTGGGATTACAGGCATGAGCCACCACGTCCGGCCTCAATGAGGGCTTTTTAAGGCAAGTCAGG
AGTTTCCTATTAGAAAGATCACTCTACCATAAATGGAGAAAATTGGGCAAAGGGGAGGGGATGGCTAGTGGGTGA
AATCATGGAGACTAGAAGGAAGGAAGCTGTTGAATTAATCTAGACAAGAAATGATAAGGTCCTAATAGTGGCAGT
GGAGATGGAGTAAAGTGGACGATGGGAAAATGGGATGAGGCCTCTGGAGAGCAGCTCACAGGCAATTTTTTTTTC
ATTCCCTACAATGACATTTGCCTACGGCAACACACTCTGCCACATGCAATGAGGTAGTGACTGGCTCAAGCTAAG
GAAATAATCTTGTTACTGACGTGGTATCACCGGGAATCATGGCTGTATAACTGTAGTTTCATAATCAAATTTTGG
AACTCTACATTTAATTGCTTAATGGTGATGATGATTATGACAGGAATAATACTGATAATAGCTGCAACCCAATTT
TATTGGACACTTATTCTGTGCTAGTTACTGTTCCAAGCATTCTGAATTTACTAACCCACTTAATCTTCAAGTGAC
TCTATCGGGTAGGTTCTATTCTTACTCTTAAAGAATAGATGAGGACACTGAGGCAGCACAGACAGGTTTAATACC
TTGTCTAAGGTCACACAGCTAGGAAGTGAGAAAATAAGGATCTGAGCCTTGGAAATCTGGTTCTAGGACGCAAAC
TTCCAAAAATTCTCCTATCAATTTACAATGACAAACATAAATTATGGTCTTTCTCCATAAAACTCAATTTGAGCA
CTAAAACTGACTTTTTACCATTTGTTATGAACATTCTGAACAATCACAATAAAAAGTAGTGCGGAGACACTATTC
AAGTCTCTAAAAACATCTTAGGAGTGGTACATGAAGCAAAATGCTGGGTGTGAGTGTTTTTGCAGATTCAGGCTC
CAAAGAACAAAAAAGCAGAAAAAACAAACAATGGTGTTTTTAAACAATGAATGTTGTTTTCCTTTAGCCATAAGG
GAATTTTAAAACTTGACAAACTCATTCAGCTTTCAAAGCATTCCACATTCCCCACCCACAAGCAAATGCCAGAAG
GTGCCAGTTTGAGCCAACTCAGCTCAGGAATGACTTTCTAAATACTGGATCAGATTTCTTGAATGTCCGCGCTCC
ACAGATGGATACTTACTATTGTCCTAATTGGTCTGATGAAAAGTACTTAGCAATTTATCAAGCAATTAATTTAAC
AAAAACATTTCAGCAAGAGATGAGATGGTGTGGCACAAATGCAGAAACAGAAATTTGAAAAGATTCAAATGTATT
ACTTCAAAAAGATTGAAAAATTGCTGCCTAAAATCTTTGAAACTTTAGAGCTAGGTTGTGCATAGGCTTAATTTT
TAATGAAGAATCTTCTGGGAAAATAAGTTTTTGATTATATAAAGAAAGCAATTTCCTTGATTTGCAGGAAATAAT
TCTTTTTGGGGAAAAACAAATAAATTAATATTTAATATACTCATTACATCCATCCAGCTAACATTTACTGGAAGC
ATGCTGTGTGCCTGGCACCATGCTAGGCACTGAGACACAAAAATGAAAAAGACAAGAATCTTGTTCTTTAGCCTA
GGTGGGGAGATAGATAAGCAAAGGAATAGTGTAATAAATGCAATAAAAGAAATACGTACTAGCTAGACCTGTGGG
AAGAAAGGTTAGAAAGATGAACAGAAACTGTGCTAGAATTTTGGACCTAATTCTGTAAGTGTTGGAGAGCCATTA
AGCAGAAGTGATCGTTAGATTTAATTTTAGAAGGATCATGCTGTTATCAATGTGAAGAATGGGCTGTAGTGGGGA
AACGCCAAAGGCAGATTCTGTTCCACTCTTCATAAAAATCGTACCACAGCACTCTGATACCCTTTTTGCTCTCTA
ATCCATTTCTCTTTTCCCCCCAACACAGATAATTTAGAAATTATTTAGTCTTTTAAAAGCGCTGGTGTCCAAGTT
TTTGAGGTTTTCCCAGATATTTGTTATTGGTTAATAATTTAATTCCATTGTGGTCAGAGAACATATTTTCTATGA
CTTGAATCCTTTTAAATTTATCAAGATTTGTTTCATGGCTCAAAATACGGTCTATCTTGGTACATGTTTCATGTA
CTCTTGGAAAGAATGTGTGATTTATTGTTGTTGGGGACTGCTGTGCTCTACAAATGTCATTTAAGTCAAATTGTT
TGATAGTCTTGTTCTAATCTTCTATATCCTTACTGATTTTGTGTATTCTTGTTCTACTAAACATTGAAAGGATAT
TAAAATCTCCAGGCTGCGTGCAGTGGCTCATGCCTGTAATCCCAGCACTTTGGGAGGCCGAGGCAGGCAGATCAC
GAGGTCAGGAGATCGAGACCATCCTGGCTAACACGGTGAAACCCCGTCTCTACTAAAAATACAAAAAAATTAGCC
AGGCGTGGTGGTGGCCGCCTGTAGTCCCAGCTACTGGGGAGGCTGAAGCAGGAGAATGGCGTGAACCTGGGAGGC
GGAGCTTGCAGTGAGCTGAGATCCTGCCACTGCACTCCAGCCTGGGCGACAAAAAAAAAAAAAAAAAAAATCTCC
AAACATAATTGTGGACTTGTCTACTTCTTACAGTTCTATCAGTTTTTGCTTCATCTATTTTGACACAGCTATGAG
GTGAAAAAACATTTAGGACTGTTATATCCTTTTGCTGAACTGACTCTTTTATCATTATAAAATGATCATTTTTAC
CCCTGGTAATATTCTTTGCTCTGAAATCTATTTTGTTTCATATTGTCACTCCAGTTTTCTTCTAATTACCAATAT
GATGTATCTTTTCTCCATCCTTTTACTTTTAATCTGTTTGTTCGTCCTTTATTTTTAAGGTGTGTTTCCTGTTGG
CAGCATATAGTTGGGTCTTGCTTTTTTATCTGATCTGAAAATCTGATTTTTTAAGGACATTTCTAAAATTGAAAA
ATAAAAGTTGTATATATTTATAGCATACAATATGATGTTTTGAAATAAGTATACATTGTGAAATGACTACAGTTA
ATTAATATATACATTACCTCACATATTTATTTGTAGAGAGAACACTTAAAAGATACTGTTAGCAATTTTCAAGTG
TACAATATATGTTGTTGGTTATAGTCACATTGTACAATAGATCTCTTGATCTTTAGCTTATTCCTCCTATCTAAC
TGAATAAGTTGTACAATAGATCTCTTGAACTTATTCCTCCTGTCTAACTTTGACCAACATCTCCCCAGCCCACCG
CCTCTCCCCAGCACCTGGTAACCATGTTTTTACTCTCTGCTTCTATGAGTTCCAAGTTTTTCAATTCTGTGTGTA
AGTGAGATCATGTGGTATTAACAATCTCTGACTTTTAATTGGGGTGTTTTGAATGTTTATATTTAAATATCTTTA
AAAGATAATTGACTGTATAAGTAAAATTAAAAAACAATAAAGTGTGGAGTTTATAATGTTTGTAGAAATAAAAAC
GTTAAGACCATAACAGCAAAAAGACAACAACAGTAAGTTTCTTAAGCTATATGTCAAGTAGTATATAAACTGGTT
ATAAACTGGTAAATTAGAAAGAGGTATAACCCTAAAACAACCACTAAAATAAATCAAAGAGTATAGTTAATAAGA
CAATAGAAAAGACATAGTAGAATAAAAAAATCCAAAAGTAAGGAGAAAACAAAAAGAACAAATAGAAAACAGCAA
GATGACAGCTTTAACCTACCATGCCAATAATCATATTAAATGTTCTAAATGCCCCAATTACAAGCTGGAGATTGT
CAGATTGGATGAAAAAGCATTTATGAAGCACTAGTCAGGTACTGAACTAAGGATCGTATAAGGTCTCATTAAATC
CTCTGGTGAAGTACGTATTATCACTCCATTTCCAATATTTACAAAATGAACCTTGCATAGGTTAAGTAACTTCTC
CAAGCAGCACAGCAGGGATTCACACTCGGGCTCTGAATAGTGCAAGTAGACCTGTAAAACCTGCTTCCTTACTCT
CCTTTCAATTCAGCTACACTGAGTACCAGTTACATGGAGTTACTAAGTTAGGAGCTGTGCCCATGGCAATGACTG
TAACTGTCTGGGATGAAATCCACCTTTACCAGCTGTGTGACCTTGGGCGGTGTATTACACATCTTTAAGCTTTAG
TTTCCTCATTTGTAAAATGGAAGTAATAAAACTAGTCCCATAGTGTTACTGTGTGTTAAATGGAGGTGGTTGACT
GTTTTTGTTACTTTAAGCTATACCCTGCAGATCATAGGAGAAATATCAATTTGTGCAATTCTACATCAAAATCAA
AATAGTATTATATAAGAGTGATCTGTTTAAACTGTAGCATTATAGAAATATACTATAGAAGGAACTATTTTATAT
TTACTTTATAGTATTATATGAAGTTTTGGTTTCTTCTTTGAGAATCATAGTAATGTGATCAGTTAGTCTTCTTTT
AAAGAAACCTCTCATCCCAACTATTCTATTTTCAAAAAAAAACTTTTTCTTGGAGTGAAAATGTCAAACCTATTC
CTAGCTTTGCAGATGAAAGTGTTCAGATTCCTTGGATTTTTACTTTGGATACATGTATTAGATACCTGGGATGAA
TAACTTCAGTTTAGGTTATATTAATATTATAATAATAAGAATGTTTAAAAACAATTTATCTAAATAGTATTTTAC
ATTTGAAATATTAATATATAATTTGAAAAATCAAAATGAAATCCAGAGAGTTAAGCAGAAAGTTTTTTTAACATA
AGATTATATTATAAAGCTTCTTTAAATATTTTTTCTTTGAAAAGACAAAATTAATTTTAAAAAAAGTTTAGATCC
AGCATGACTGTCAGCTGAACAGAAGCTGATCAGTCTTCAAATATCATAGTATTTTTTTCTGAATGAACAACTGAA
AGAGGCAAAATTTCAAATATATTTTATTCAAAATTCTCCATTTAGGAGAAAAGATATATAACAATGTTTACACAT
GCTTTAATAACTTATTTCACTGTACAACTTACATTCTGTATAACAGTACAATAAACCAGCCAAAGAAAATAACCA
GTTAGCACTTAAATAAGAATCTACCATGTAAAAAACACAGTATGGGACACTACAAGGTAGTATTTATATATTTTT
TAAATGACTGAGCTACAGTACAACAGTCATCTAGTTCAGTGGTTGTCTAAAACATCAAGCTGTCCACATCTTTCT
GATTCATGATGGGAAAGCTATTATGACCTTTCACATTCGAACATGTCATTTTGTTGTGTAAATTTGGTGGGTGGG
GGGCAGAAGGGCTCTATTACCTTTATCCCTTTCTTATAAATATATTTTCCCTTTTATATTACTTCCAGAATTTTA
AATAAAATATTTATTTGTGTTTGTGTAACTACAATGTCAACATTGTGTTAGAATTATATTAATCAGTTATTTTAT
AGCCAGCAAAATGGTCCAAACGCATTAAGAAAACAAAAGATAACTTAGCTCTGCCAAAGTAGCACCTAGGAAAAC
AGCACTTCAGTAAAATTTCTCCTGCTATTCCTTATAGCCTATTGCAGGCAAACAGCAACAACTTCAAAAACATAG
GCAGAAATGCAAGAAGGAAGTACTCAAGGAACTATTTTCTGTTTCTGAAAAAAAGATCTTATTAGTTAGTATATT
CTCTAAGGCATTTTATAATCTCAGAGTTGCAATGATTGCCAAAGCAGGTACATGGTAAGACTTAGCAAGAAGAAA
ACAAGATGAAAATGACTGACCAGTGAAATCTGAACTTGTTCCAAGTAATTAGATTTTCTAAGGAGAAAAAAGGCA
CAGGAGGTGCACATTTCAATTTGGCTCAAAAATAATGAAAATTAATTTAAAAAGTTGGCAACAATTACTAAAACA
TAAAATACAATTTCCTTTTACAGAGCTCAACTACATAGAATATCAACAATAGCAAGAACAATAAAATAAACAAAA
CACCCTAACTGTGGTTCACCAGGAACAAGGACTATAGAGAACTATTAGACATTTCTACAGACTGAATCCCAGGGA
CTAAATCCACAAAGTAGGATCTAATAATCAATTCCAATTAAACATCTGCTTGATCAATTTTCTTTCTAAAGCTCA
TCCTATGTTCAAGCTCACTTTCTTTCTGTGGAATTGAAATCATTTAAAGGCTCTAGTTTTCAGTTGATTGCAGAA
GTATTACAGTAATTCTACACACCAAAGAATGCCAAAAGATAGAAAGTCAACTATCTGTAAAAGCCAACTCAGATT
TCACCTTGACACATGTAAACCATGAATCATGTATTTCAAAAAAACAGTAGTTGTGGTCAAGTTTACATCCTATTA
TTATATCTTTAAAAGATAGCAATAATATTTATTATATTGTAAACATAGGTCTGTATCCCAAAAGCATAAATCTAG
GAAAAGAGACACCCAATGTAATGATGCACCTGACATCCCCTCACAGGCTCTTGTGAGAACTGTAGTGTAACTTAC
TTAACTGCAATTGCTGAGAGCAGAATTCTGGAGTATGATCCAGGGGAACGTTTCCCCACACCACTGAGCTACTTT
ACCAGCGATCATGATTGTGATGGAATAGGCTTATTAAGTTACACATTTAAAAAGTCATTAGAACATCTCGTTCTT
GCACACTAGTGTAGAAAGGTCTTCCAAAGATAAAAGAGTGTAGGCCTGGTTTAATTTTCTCAGCCAGAGCCATTA
TTATGTTAAGATCGCCCTCTGCTGTTAAATCAAGGTCTATCTTCAGGTTCCGAAGAGATTTAAAGGGCTTTTTTC
CCTTCTGCCTAAAAATAATGGAAAAAAAAAAAAAAAAAAAAAAAAAAGAAGCGCAAAAATTATGATATAGAAAAT
GTACAAAGGAAACAAAACAAAAAAACAATGTACAAAGGTTTTTCTTCCGTGTAGGAGTTTTACTCACGTATCGTC
TTCTATATATTTTATTAGTGTCAAGGCTTTTCTGTGAAGGACAAGTAGAAACTGTGCAAGGAAAGTACTTCTGAG
AGATAAGCCAGGTTTCAGCTGAAAGACCTGCAGGGAGAGGAACCATTTCAACACATAATTTGCTCACATTCTACT
CGTACAGAAGTTTCTATGACAGTGTTGACAGTGCTTGGCAGACAATACACACTAAACATCTCCTTAACCATTTCC
ACTGATGCCCCCTAACAGGAGTGTGGTATAGAAGCACTAGGTGTAGGAACAATCTGATATTTTTTTTTTTTTTTG
AGACGGAGTCTAGCTCTGTCACCAGGCTAAAGTGCAGTGGCGCGATCTTGACTCACTGCAACCTACACCTCCTGG
GTTCAAGCGATTCTCCTGCCTCAGCCTCCCAGGTAGCTGGGATTACAGGCACACGCTGCCACGCCCAGCTAATTT
TTGTATACTTAGTAGAGACGGGGTTTCACCATGTTGGCAGGATGGTCTCGATCTCCTGACCTTGTGATCCACCCA
CCTCGGACTCCCAAAGTGCTGGGATTACAGGCATAAGCCACCAGGCCCAGACAATCTGACAGTTTTTAGAAGTTT
TCTAATTTATCTTTAAAAATGCATTCAAATTTTGCATTCTACTTCAGAATACATCCATGTTTACTTCACTTTTAA
AACTCATACATAAGTTATTTCGTATTACTTAATTTTTTCTGCCCAAATCTTCAAATAACATTGAAGCTCCTAGAA
GATGAGCCTATGGTTTTGAGACATTCATATACCTGTACTTTTGCAGGGGGTGGAGTGGGTGGGTAGGAGTAGAAT
GTGTGCATATGATGAGGTGGAGAGTGGGAGGGATTTTATGTCAGCTTGAGAAGCATGAAATTCCAGGCCTACGAA
TTTTCCTTGAACTTCGCAATATGTCACAGACCTCATAGATCTCAATCCAAAATTTCTAGTAAACATAAGGATCTC
ATTATTTCAAAGCTTTATCTATGACACAGTTTCCTGGCCTGATCCCCAGAATGTTATTATAACAAACTGTAATAT
ATTAAGAAATAAGTTCCATATAATCTACGATTTCCTTCAACTGTGTAATTAAGTAGATATTTTTTAAAAGAATGA
AACAATAAAGATGTTATTTAAATAAGTACACTATGTTTCAAAAATATTTTTGAGTCATTTCAGGCAAATAAACAA
CCTCCCTTTCTCAAAAAAAAAAAAAAAACTTACTTGTTATAGGTTAATGCTTGAATTAAAATGTTTGTTGTTTGA
CGTATGGAATGCTGCACTCTTAATTGTTAATATACAGGCTCTTCCCCATTAATAAGTCAAAAGGAAAAATCATTT
AGACACTTTAGAAAGACCAGACACTACAAAAAGCACCTAATAAAACAGATTAGGACTCAATTCTTAATTCTATCA
TTTTATAAATGTTAAAATATATATAAAAAATATATTACACTCTATCATAGAGTATATGTTATATATTTTACATAT
CATATATAACATATACTCTACATAACATAATAGGGTTTTAAGTTTATAACTTTTTTTTAATATATAAACATATAT
ATATCCTACAATGCTGGTAATATGTATATATGCTCGTACTATATATATATACACACACAAACATATATATATACT
TGTACTACATATATAGTACAAGCATTGCAGGATATATATATGTATATATTATATCTGTAAAAGCTAAGTCAGATT
TCACTTTGATACATGTAAACCAGGAATTCTATGTTTCAAAAAACAGTAGTTGTGGTCAACTTTATATCTTATTAT
TATATCTTTAAAAGATAGCAATAATATTTATTATATTGTAAACAAAGGTCTGAATTCCCGAAGCATAAATCTAGG
ACAAGAGGCAACCAATGTAATGATGCACTTGACATGCCCTCACAGACTCTTCTGAGAACTGTAGTGTAACTAACT
TAACTGCAATTGCTGAGCAGAACTCTGGGGCATGATCCAGGGGAATATAAATATATAGAACAGGCATTGTAGGAT
ATATTAAAAAAGAAAACATGTCATATCATTCACTCTGACAATCTCAAGTTCAACATTTACCTGATCCAGGAAGGC
TTTCACTAGAGTGTCTCTGTGTAAGACATCTTGAAAAATATTCCTGAAGAAAAGAAGAAAATGAAGAAAAGAAAA
AAGTTCAAATGTTGAAATGGCCATATAATGCTACCTTCCACAATCCCTCACTTGAGCCAACATTTTAAGTTCTTA
TAAATTGATATTACATATAAACACATTTGTAAGAATATAGATATATATATTTGGAGACACAAAATATACATTCAT
TTATTTACTCAAGGATATATTTACATTTTACTGGTGTTTGTCAGGCTAATATGTAATTTTTTCTCTAAAGAATAT
AAGCAGTCCCCAGTAAGGGTATGTATGTATCTATCAATCTATTTTACTACTCTCATCTTTTAAAAAAAGTAGAGA
CCCTTAGGCAATTAATAAATAAAACTACCAATTCTTGCCATCTCAAAAAAAAACAAAAAACAAACCAGCAACAAA
AATAAGCCACTACCATCAAAAACCAAAACAAACCAAAAAATGTGAAGAAAAATTTGAGTGAGATTAGAGAACACA
CTCCGATGATTATCCACTGGGTTTGCCTCAACAAGCCCACCATCTGTAAGTAACATGAACCAACTATCCAAGAAA
GTACTACCTACCTTGGCAACGACCAGAGTGAGTAGTAGTAATATAATGGCCACTTAAAATAATGTGTGCCTAACA
CAGCACCTAGGATATAGCAGGTGCTAAAGCAAACACACAAACAAACAGGACTACTTATTCCCTTCCCAGGCCCCA
CCTCCCTTTCATCTTTTTCTCTTCCATTTTCCCTAGGTTCTACTCAGGCCAGAGGGTAAGAGAACATTTAGTAAG
AGGAGGAGTTTTTAACTGAAAGTGGTAGGGATCATCCTATACCTGACCAGAGTGGCAAAAAAAGAGAATGGGTAT
GTGTAGAAGCAAACAGGAAGGTAGTTCAAGTTTCCTTATCTTAAGAAACGAGTGTACCACACTACAGAAGAAAGA
AACCGTAAAGGGGAAAAATATTAGCATTTCGTCATTATTGACTGGGCACTGATAGTGCCCCTTCTTGGGCTCTGG
AAAGAGAATAAGGCTTATATTTAATCGAGTGGACTTATTATACCTGTTCCACTGAATGAGTATCTTCATCATAAG
TGAATTAGATAAAGCAAGGTGTTAAAAAAGAACATTTCCATTTGTTTGTGTCATCTCTGATTTCTTTCAGCAGTG
TTTTGTAATTCTCATAGAGATCTTTCACCTCCCTGGTTAGCTGGATTCCTAGGTATTTTATTCGTTTTGCGGCTA
TTGTGAATGGGACTGTGTTCTTGATTTTGCTCTCACTTTGGAAGGTGTTGGAGTATAGAGAATGCCAAAACTTTG
CTGAAATTTTTAACAGATTTAGGAGTTTCTGGGCAGAGACTATGAGATTTTCTAGGTACAGAATTATACTGCCTG
CAAACAGAAATAGTTTGACTTCTTCTCTTCCTATCTGAATGTCTTTCTTTCTTTCTCTTTCCTGATTGCTCTGGC
TAGGACTTCCAGAACTATGCTGAAAAGGAGTGGTGAGAGTGGACATCCTTGTCTTGTTACGGTTCTCAAGGAGAA
TACTTCCAGCTTTTGCCCATTTGGTAAGATATTGGCTATGGGTCTGTCATAGATGGTTCTTATTTTTTTGAGGCA
TGTTCCTTCAATGCCTAGTTTGTTTAGGATTGTTTGTGATTTTTCTTTTTTGAGACAGGGTCTCACTCCGTTGCC
CAGGCTGGAGTGCGGTGGCATGATCTCAGCTCGCTGCCAACCTCTGCCTCCCGGGCTCAAACAATCCTCCCACCT
CAACCTCCTGAATAGCTGGGACTATAGGTGCATGTCACCATACCAAGCTAATTTTTTTTTTTTTTTTTTTTTGTA
GAGATGGGGTTTCACCATGCTGCCTAGGCTCGTCTTGAACTCCTGGGCTTAAGAGATATGCCCGCCTTGGCCTCC
CAAAGTGCTGGGATTACAGGTGTGAGTCACTACACCTGACCTACTGAAGGTTTTTAACATGGAGGATGTTAAATT
TTATTGACAACCTTTTCTCTACCTATTGAGATAATCTTGTGGTTTTTGTTTTTAGCTCTGTTTATGTGATGAATC
ACACTTATTGATTTGTGTATGTTGAACCAACCTTGCATCCCAGGGATAAAGCCTACTTGATCAAAGTAGATCAGC
TTTTTGATGTGCTGCTGGATTTGGTTTGCTAGTATTTTGTTGAGGATTTTTGCATCTATATTCATCAAGGATATT
GGCCTGAAGTTTTCTTTTTTCTGTTGTGTCTCTGCCAGGTTTTGGTATCAGAATGATGCTGGCCTCATTAGGGAA
GAGTTCCTCCTCCTCAATTTTTTGGAACAGATTGAGTAGGAATAATACCAGCTTTTCTTTATACATCAGGTATAA
AGAGATGACACAAACACATGGAAAAACATTCCATATTCATAGATAGGAAGAATTAATATTGTTAAAATGGCCATA
CTGCCCAAAGCAATCTACAGATTCAATGCTATTCCTATAAACTACCAATGATATCCTTCACAAAACCAGAAAAAA
CTGTTTTAAAATTAATATGGACCCAAAAAGGAGCCCAAATAGCCAAAGCAATCCTAAGCAAAAAGAACAAAGCTG
GAGGCATCACATTAGCCGATTTTATACTAAAAGGCTATAGGAACCTGAACAGCAGGGTACTGTTATAAAAACAGA
CACATAGACCAATGGAGAATAGAGAGCCAAGAAATAAAGCCACACACTTACAACCATCTGATCTTCAACAAAGTT
GACAAAAAACAAGCAATGGGGAAAGGACTCCGTATTCAATAAATGGTGCTGGGATAATTGCTAGCCATAGGAATT
GGAGTGAAACTGGACCCCTTCCTTGTGCCATATACAAAAATCAACTCAAGATGGATTAAAGACATAAACGTAAAA
TCTAAAATTGTAAAAACCCTGGAAGACAACCTAGGAAATACCATTCTGGACATAGGCCCTGGCACAGATTTTATG
ATGAAGACGCCAAAAGCAACTGCAACAAAAACAAACACAAATGGGACCTAACGAGCTCCTGCATGGCAAAAGAAA
CTATCAACAGAGTAAAAGACAACCTACACAATGGGAGAAAAATATCTGCAAACCATGTATCCAACAAAGGGATAT
GCAGAATCTGGAAGGAACTTAAAACTAATTAACAAGCAAAAAACAACCCACCCCACTACAAACTGGGCAAAGGAC
ATGAAAATTTTTCAGAAGAATATATACAGACAGCTAAAAAGCATATGAAAAAATGCTTAATATCACTAATAGAGA
ATTGCAAATCAATTCTCTAGGAATGGCTATTATTAAAAAGTCAAAAAATCACAGATGTTGGCAAGGTTGTGGAGA
AAAGGGAACACTTATACACTGCTGGCGGGACTGTAAATTAGTTTAGCTATTATGAAAAGCAGTTTGAAGATTTCT
CAAATAACTGAAAATAGAACTACCATTCACCCTAGCAACCCCATTATTCTATATGTACCTAAAGGAATACAAATT
TTTCTACCATAAAGACACATGCATGTGTATGTTCATCACAGCACTATTCATGATAACAAAGACAGGGAATCAACC
TAAATGCCTATCAATGGTAGACTGGATAAAGAAAATGTGATACATATACACCATGGAATACTATGCAGCCATAAA
AACCAGATGGAGCTAGAGGTCATTATCCTAAGTGAACTAATCCAGGAACAGAAAACCAACTACCGCATGTTCTCA
CTTCTAAGTGGGAGCTAAACACTGAGTATACATGGACACAAAGAAGGAAACAGCAACACCAGGGCCTACTTGAGG
GTGGGAGAAGGGTGAGGATCAAAAAACTACCTATTGGGTACTATGCTTATTACCTGGGTAATGAAATCACCTGTA
CACCAAACCCTCATGACACGCAATTTACCTGTATAACACACCTGCACATGTACACATGAACCTAAAATAAAAGTC
AAAAAAAAAATTCCAGTGACCAATTTTTCATGTATTGGCAGTGACTGGAATTATTTTAAAAAGTTAAAATTAAAA
ATAACAAACATAATTAACATGTAAAAACATATACTTAAAAGTAAAATGACTCTGTGACAATAGACTTAACACACA
ATCTAGTGGCTGAAAATACTATTTTTTGGACAATTTTATGTTTAGAAAATTTAGAGCTGGATGCAAAATTTAAAA
ATTCAGGATATTATTTTGTCATGATCAGCAAAATGAGAATAGCTGTCTAACTGTAGTTTGTCAAATCAGCAAAAC
AAACATAGCTGGCTAAAAATGATTAAGAAATGTTAAAATACACATACATCCTCTAAAAAACAAAACAAAAATACC
AAATGGTTGCAAACCCATTCTGCAGTTCACTAAATTTCCTCAAAAAAGCTCCCAAGTAACCAATCAAAAAACGGA
AAAAATACTAAGCACTTTAGGAAAAAAGAAAATGTTTCAAGGCACAGATTAATTAGAAAACTTCTACATGTCTAC
TAAAATTTACCAATATATAAAAACTTACTGACATGTAATTTCAGTTGGACCAATTCATTTTCTAAAACATTCCCC
TACTACTTTCTCAAGAACCAATAAAAACTCTGGAGAACTAGGAAAAAATGGGTCCTATATTAAGTCATCTTTCTG
CACCTTGAGATGTATAAGGCTGGGGGTCCCTTGAACAAGATATTCCTATTCTATGCTTTTGGTTAACACTTACTG
TGTAATTACTGGTGCTCCACAGGTCTGTTACCTAAGCTCAAACTGATTCTGTAGATACATAGGTCAGGCTTATTT
GCCCCAATTTTTCTATTGCCTTACACACTTAGACCTGGGTTATTACAGTTAACACTTACTGTTACCTTCTATGTG
CCAGGCATTATTGCAAGCATTTTTTTTTTTTTTTTTTTAAATAAGACAGAGTCTCGGTGTTCCCCAGGCTGGAGT
ACACTGGCACATCATAACTCCCTGTAACCTCAAACTCCTGGGCTCAAAAGATCCTCCTGCCTCAGCTTTCGGAAT
AGCTAGGATTACAGGCACACAGAAACACATTCCAATAATTCTTTTTTATTTTTTGTAGAGATGGGGTTTCACTAT
GTTGCCCAGGCTGGTCTGGAACTCCTGGCCTCAAGTGATCCGCCTGCCTTGCACTCCCAAAGCTCTGTTCTTACA
GGCATGAGCTACTGTGCCTTTTTTCAACTGATAAAAGAGAAACACAAAAGTATACTATAATTCTTTTCCTGATTT
CAGAACATCTTTTAAGTGTTTACTTAGGGTTTTAGGATTATAGATTTATCATCATCATTTTTTTTTTCAAGTTGG
GTCCATGCTCAACAATTAATTATCATTACTTTTCCTTTTGAATTTACTGTTCAGGCTTTTTTTTTTAAAAAAAAA
TAAGAAGTGAATAACAATATAAAATGCAAAGTAAAAAAATGTTCCATTAATATATTTTAACAGTTTTGCTGTATT
TTATATTCATATGTCAAGAAAAAAAAGACTTAGAATTACTTCTTTGGTTTTGTTAATAAGTCCATTCAATAACTG
TTACATAATAGACTATACACAATGTAGGGGCTGGGGCTGGGGCTGTCTGGTTGGCCACTATTAAGCCCGGTACCT
AGAACAGTGCCTAGGAGCTCAATATATATTTATTAAACAAATAGTTAAATATTTACTTTAAGGGTTAATCTTACC
TATTTTAGGGTAAACACAATTGTATGGAAAAAGAAGAACATTTAAGAAAAAAATGCTTGATTAAATGTTTCTTCA
AGCATAATTCTGCTGGTAATATTTCTTTCTTTTTAAATGCAACTTCTGTTTTGTTTTTATTCGTAAAAGACACAA
TTTCATATTGCTTGACTACAGTACCAGCAGGCAGAGCATTACGTACAAATCAGGAGTAAAGCTTTCGTCAGTGTA
GATGATCGTATCCTGAGCCATGTCTTCTTCTGAAGTGGCTCTCCAGAAGGCTGTCAGCTCGGATCTCATGTATCT
ACGCTGATTATAAATATGTTCATGACAGGGTGGCATCTGCTTCACAGTATTGACATCCACATCTATGTGTGTGGT
GGGATATGGAGCATACATGACTTGCCGGAAAGGCAGCACAAAGCTTCCAGTTGAATCCTGTCAAAATAAAAGGAA
AATTTACTGTCTTACATGCCAAACGATATGAATAATTGTTTTTTAATTTTAAAAAATGGTCTCTGATTTAGCAAA
TCCATCTCTAAAAATTTATCCTAAGAAGCTATTCATGAGTGTGTGCAAAGTTTTAGTGACAGAAGTGTTCAGTAT
AGCATTGGTTTCAATAGCAAAACATCAGAATGACCTAAGCATCCAAAGGAAGTGGTTAAGTAAATAAAAATGAAT
TTATTATTTGGCATCTATAGATGAAGTTGTTGAAGTTTGTGTTGATATTCAAAGAGGCTTAGAATCTGCTGTGAA
AAAAGCAGATTAGAACATGCAGAGATGATCCAGTGGGGGTGGGAGTCTTAAAGAAAATACATGCAAAAGGGAAAA
AAAGACTAGAAAGAGATATACCAAATATTAACAGTGGGTATTCACTGGATTCAAAATTACAAGTGTCTTTTAATT
TCTTAATTATTCTATGCACCTCAATGAGTATGTATTTTTATAAAACAAATTTACTTCTTTCCTAATCAGTTGGGG
TAGCCAGTTACCATGTAATAATAACCTACTGCGTATGAGGCACTGTGCTATGAACAGAACAGAAGAAAGAGGCTA
TTTCCATTTTTTTACTATTATAATGCTGTGATAATCATCTTTGTATAATGTCAAAGGTATTTTCTGGAAAACTAT
ATGATTTGTATTTGCATGGAGAACTATTAAATATTTTTTCATTAGATCATAGTTTTGAAATTTCCTCTAGGCATC
TGGTATAGGTCCCTTTCAGAACTAAAATTATATAATTAAATGAGAGGGTGCTGAGGAAACAAAAGTATTAAGCAC
TTTATTATGCCTTTAACAGGAGAAGTTCTAATTTACAGATATGTATAACTCAAATAGAAACTACGTTTCCTTTAA
CTAGTTTCTATATTTAAATACTATCATTCTGAGTTCATAGCAGCACATTATTGAAAATGCACAAAAGCCTAATAT
AACTTGTATTTGCAACAATTTTTAAATTTTTTTATTTCATTTTGCCGTGGCTACATCCTCAAGAAAGTAGTCACT
ATGAGACAATCACATAACCATTAGGAAAGCTATTTCTTCACGTCTTGGGACTATAATTGAAATAACAATAATAGA
TTCAACAAGGTGAACAACTTTCTTCCCTTTAAGTATTATAAATAATTGCTAATTTACATTTCTCTGTTTTGCTCC
TTGACAGTAGACTCAAATAAAAGAAAAATACAATTTTTTTCTAATATATATTATATATAGAAATATATATATTTT
AGTACACATACATAGGAATTGCTTAAATCCTATAAGCTTCTTAAAGATGTTTAAAATTTTTTTTCAATAAAATTC
AAATCTATTTAGTTAAAAAGAAATGATCTTATTTTTGATGTGCAACCTGATTTAAGCATGTGTTAAAAAAAAAAA
AGTCCTGAGGCTAGACATGTAGGAACAGGGACCCACCTGGAACACAAAGGGTATTCTATGGTGTTTCACTGATGA
TACTAACTATAAATCCATAAGACATATAGTCTATGTGCAGAACTGTGTAAAGGAAGTCAGTCTCTGGGCATGTCA
ATATGAGATACATTAAATGCTAATATTTAAGATTTGTCTATAAAGAGTCTCAAAAATGATTTTAGAAAAGTGGTT
TCACTTGTGATAACTAGAAACTATACCTTTAGCAGGCCTTGTACAAAGAGCCCTGACTCATATTTAAATGATGAT
TCTGCTTCACATAACCTGGAGCATTTTCTCTCTGCTGGAGTCAGAAAAAGGCATAATGTTCTGACTATCTATAAA
AGAAAATATTTTAGCATTAAAACATGAAGTAAAAAGACCACTGATTTGCTTATGAAAGATATCTGAAATTTTAAT
TGTTATTATCAATAAAACATATCCTAAGAAATAAGTATTCTTTAGTCACCTGGAATCCATGGGATGTAACAGTTG
TTGCTTAAAATAGGGATTCTGTGGTCAAATAAATTTAGAAAATGCTTGGTAAATTTACTGTATGGCATCTCAAAA
CCTTTAACATTTGGCTACATACTGTGACTCTTCAGGTGAATTATATCATCTGCAGACTTTCTCAGACTTATTTGA
CCATGCAACTTTTATAGCTTCTGTTTAGTGGGTCTACACATGAAATTCGTTGTAAGAAATATCAAAGAATGTCCA
GATCCTCCAAAAAGAAGAGAATTAATTATTGAATTTGATTTAAAATAAGCAGGTCATTGGGTGGGATTTAGAAAT
CTGATTCTAATAATATTTGACCTACAGCTCTATTAGGAAAAATAAAAAGGCATGTAACTATCTTGAAATTCAAAC
CATATCCACAGTTATTATGTTAAAGGAGTGGTTTTCAACCTAGAGTGGTGGCAACTTCTTTCTCAAATTAAAACA
AGATAAAAGGTAAGCTATTCTCCCTCAAGAGGATGGAGGATGGGAAAAATGTTTAAAAAAAAAAAAAAAAACACT
CCAACTATGGAGCCTTTCTCCCTTCATAAAGCAGCTCGGCAGTCACTCTGTGCAACCTAAGGCTTTGGAGATCAC
AGATGGAAAGCCACCTGTTTGAGGTAACAGAAGGAATAAGGTCACTAGTTCGTAGATGCAATATAATGACACAGG
TATACTAAGCTCTCATAAATGGTTATATGAGAAATATAAATTAAGGCTCATGTAAATATACAAAGTAGCTGATTA
CAAAAAAAAATTATGAATATCTTTGTAAAGTATCATTTCCAACATATTTCCTATGTAAAACTTTTTTTAAAAAAT
TAGGTTTGCTGAAATTGAAAGATACACATACTTATCTCTGAACTCTTTCTAACTAATGGTCAGTGAAGAAAAGTG
CAAAATCCTTTAGTTTATTAGCTAATGCTTGGAAATGTAACTGTTCATTAATCCTTAATTAACTCAAGTAGCACT
GAAGGAAAGGGTCAGAAACATTACTGAATAAAGTATAATAATCAATGACCACTTAATCCCAATAGCTCCCTAGAA
GGGACAGATTTAGAAGGAAAGCGAAGACAATGAAATCAAGATGAATAAACAAATAACATTTCTTTGGAACTACTA
CCAAAAGTACATGACTATCTTCAGATTTGTTAAAGATAACATTGGGAAATAGAAGAGTAATTTTTTTTATATATC
TGATTTTAATATATTCTCAAAACCATTTATACACTACTGACACTGGTATTTCCGAGCTATCAAAATAAACTGATA
AATGATTCTTACTCAGTTTATTTCAAACTCACTGTTGCCACAAGGTGTCTTAGCAATTTGATGAGATTACATTGC
CTCCTTATACTACTAGATCATTTTAATTGCAACCTACCATTTAAATGACAATCCATGATATATCATCAGTCTTAA
AGAGTCAAATCATTTGCTAGATTATAAAATAAACTACCTTATTTACTTTCTCTGCACTGCTACCTACTACAACGG
AACAGCCACAGGTTTGCAAGTGTGAGCTGATGGCACTGTAAGTTAAAGAAAACAGATTAAAAACATTGCCTATAA
AACAATTTAACAAACTAAAAACAAAAAAAAGTAGGTGAGCTCTTCAAATAACTCAGAATAGCTTTATATGATAAA
CACCGAAGCTATAAGCACAATGTTATCTTTTATTTGTATAGGAACCTACATTTTCTAGAGACCTTTCACAGAAAT
TTTCTTATTGAGCCTTAAAACAGCCCAATTAGTCAGTATAATATCATTTAATTAATGTATTTATTTATTGAAATA
CCATCATTTTATAGCTGAAGAAATTGACATGTAGAGAGATTAAGTGACTTACTTAAAGTCAAATGGGATTTAAAA
TGATGTATGAAAGGCTGACACTGAACAGATACAGGACTAAAGTGCTTCTGATTCAAGCCATTAAGGCTCTTAGGT
TAAACACACTCATGCCTCTGATACTCCATCATGAGCCTAAAGGAAAAGACTGTGAACATAAAAGTGAATACTTTA
TACTTTTACTTCTCTTTTATTAAAAGTAAAATTTCATGAAAATCTGTAACTGTGAAGAAACTTTAAAACAGAATA
TAAGATAATACATGTAAAGCAACTAGTAAAGGAACTAACATGTAGGCACTCAACAAATACTGGCTATTTCTAGAA
GAAATGTAAATAGGAAATGTTAGCTATGAGCTATTATTAAGTGTTTTTATGTTCCAGGCACTGTTCTAAGTGCTT
TATATTATTTATCTTACTCAATGCTTATAACAACCCTACACATTAGGTACTATTACTATTATTGCCATTTTACAG
ATGAGGAAATAGGTGTATAGAGAATTCAGGCACCTTGCCCACGGGTACACAGCATTAATCCAGGGAGTCTGGTTT
AAGGGCACAAACTCTTAAGTACTAAACTCCACTGCTGGATGGAAAAAGATCAGTATAAATATGAATAATTTTGTT
CTACGCCTAAATAACTTAAGTTCATCTACAGTACAACTTAATATGAAAGGATTCTGTTAGCTTTAATGAGAAGTA
AAACAAGAAACCAGAATCAAGCAAGGGGCCATGATTTCTTGTCTGGGATGGAAACTCGGTTTCTTTAAATAGCAA
ATGGAATAACACCAAATATATATAGAAATATAATGAGTGAAAAATAACACAAATTTAAGCAACAGTTCAAATACG
TAATGTCCCTAGAACAATCTAAGTAGACAGTCTGTTATTTTCTTTCTTCCAAATCTTGTCATAGGTGAGCATAAG
ATGGTATCTGCTTCATCCAGCTTTTATGAAAAGAAAAATTCTTACTTGAGAAGAAAGCCTTCATGACAGCTGTCA
CCAATATCATCATCATTGAGTACTGTATCAGCTATCTAAAATGCATCAAAAAATAAAAAAATTAGTCTGGCTGTA
ACATAGTGTTGAAATAACACTTTTAATATACAAGTTTTCGGAAGTCTGGATTCAATATAACACACTGCCTTCATT
TCCGAGAATCAAGACTCCCCAAAAAACAATCTCTGTGCACTACCATAAACTTCAGAAGAACAAATGTGAAAGCTG
GTCAAGCAGGTTAAACAATTTTTACAAGAACAACTTCCTCTTCTGAGCTGTCAGAATCAGGAGACTAACCTAAAT
GACAAAATCAGAAAACAACAAGAATAGTTTCCTAAAGGTATCTCTTAACACTCATAGTGTGTGATTCAAAACGTC
CTCAACAAATGATTAAGGAAACTAAATTTGTGACTACAAGTAAACTTCCATTAATGGTTACTACTTTGGCACACA
GTTTTGTTTCAAAAGACACTACATTAAATATTAATTGCTCCTATAAGAGCTGGGATCCTCCCACTTTTAGGAATT
ATAAAAGTAATGAAATAAACAAAATGAATTTAATTTTGTCATCACTGATCAAAAATGCCTCTGTTTTGCCATAAA
ATCCAGGATTTTGTGTGTGCTTATTTGCTAAAGTGGCTAATACTGTATGTGAATAGTATGTATGACAAAGTCCTT
ACTATTAAAATTAGAATATTAATAATATACATAATAATACTATAACCCCAAAAAACTCATAAAGTGTATAATTGC
TCTCATTTAAACTTACATCTATTTCTTCAGGAACACTGTGTGATTTCATAGATGAAAGCAGTTCCATTACAGGAA
TCACTTCTCCAGTAAGCATTGGAATAATACTCTGACCCTGCACAATAAAGTGACATGAAGTGAAGAAAATCACGT
AATATGAGAGAAGCTGGGCAATAAAAAATAAAAATAACATCAAACAATAACATTCTTTGATGAAAATACTTCGTA
ATTTGTTCAAACACAGTATCAAACAAGTCTACTACATGTCTAAAGGATTTATATGCAATCCAAAGCTCACTTTTA
TTCTTTCTTTTCTTTTTTTTTTTTTGAGATGGAGTTTTGCTTTCATTGCTCAGGCTGGAGTGCAATGGCGTGATC
TCAGCTCACTGCAACCTCTCCTCCCAGGTTCAAGTGACTCTCCTGTCTCATCCTCCCAAGTAGCTGGGACTATAG
GTGCCGCCACCATGCCCGGCTGATTTTTGTATTTTTAGTAGAGACGGGGTTTCGCCATGTTGGCCAGGTTGGTGT
CAAATTTCTGACCATGCCCGGCCCTAAAGCTCACTTTTATTCTTTAGAGAGTATGGAATCATTGGTTTATCGTTT
ACTGTTACATGCAATGATTAAGTCATCATGCCTCTTTTAGAAAAGATCTCCTTTAAAATTTGAGATAAAAAAAAT
TTGTTAAAGGTCATCAATATATTTCATATTTAAAAATGAGGAAAACCAAGCACAAAAAGACTTTGAAATCCTTAC
CAAATAGGTAAGGAAAACTTGAATCAATACCTAACCTCCATACTCATAAAAGTATAATCTACCCAAATGCAAATC
AAAATCAGCACATATATTTTAAGAATCAATAAAACAGAAAAATTCCCTTTAGAGCTATTTCAAGATATTACTACT
TATTACATCTTGAAATTGTAATTTTGAAATTTGTAGTCTATAGAATCAAACTGAAAATTCAGTATAACACATCAC
AAATGTAAAGTGTCTCAAATATGGATGGTCCCTCATTTATTCACTACCACCACCAGTCTCATCAGTTTTGTGACC
AACTTGGTTAAGTAAATTTTTTGAGATATAAATGAAATTGTCAAATGACTATGCATTTTTAGCTAAACATATTTT
TTAAATCATACATTATTTAAGATGAATTTAATACTAGTTGTTTTTCCTCACTTATTTTATGAAATGATTTTACTC
AAAGTCTTCATAAGCATCTTTAAGTTAGAATCTTTGTCAGACCCAGGGCCATTTTTGGAGTAACCTTAACCAGTT
TTTCAGAGCCCCATATTATTAAGTTGCTTGAGAATTTAAATGTGATGCTACTTCTGGAAGTTTTATCCTAAGCCA
TATGCCCATTTGCATAATGCTGAAAGTTTTATTTAAAAAAAAACCATCCTTTAGTAACCTCCACAACTAACTATT
CACTGTTTTTAGTTTTTAAAGTAATAATTATCATGCCTGTTTACAATTACAATTCACACATTCAATCTAACAAGA
ATAATGACTAGATCCGTGTTAAATTTCCTTCCCTGTGAAGCAATTTTATCAGATGACAGCTACAACTGAAGTTGT
TTCAAACTAATGCATCATCCCCAAACAGTATTGTTCAAAATAAAGTCGTTGTGAGATTTGCAAGAACTCAATCAA
AAGGCAACTCCTCCTTTTCGGGAAGAATAATTTTGGGAAAATATTTCCTCTTAGGTTTAAGCATACATAGTATTT
CATTCACAGTATCTCAGACATTATCAGTATAAGTGAATGAATAGCCTCACTGAAGCTCAACAACACCAAAAAAAA
AAAAAAAAAAAAAAATCCTACAGGGCTAAATACAGAAGAGGCTCTAAAAGAAAATCTCTTAAGTTTCTATTCCTC
CTTGTACTTCCCAAACTTGAACTTCTCAGCAGTAAGATAACATTTTTAAGAAGAGCACTTAAAAGAGAGACCAAA
ATTCATTAATAGTAGTCAACTTAAGTAAAGGTTTCTGGTTTGAAAAAACAAAATCCCAGTAAAAGCAGAATTTTA
GTTGGTTCTAAGTTTCCTCAACTTGCGATAAGTTTACTTAATTAGTCTACTAATAACTAGTGGGTTAGAGGGTGC
TGAAAGTTACCCCATTCCTGGGGACCCTGCTTATTGACCAGCAAATAAGGACTGGGATTCTTTGGGTAAAGGGAA
ATCTTTTCTTGTTAAGTCAGACCTTTACACAGAATAACTGTCTCTGAATTGGAAAGCTATCTACAAAAGTACAAA
CATAACAATTTGGTAAAGGAGATCATTGTATTGGGTTCTGTATTATGGCCATGTATTTTCACAAGTTTTTTTTTT
TAATTACTTTTTTAAAGTATCATCTGTCTCATTCATGCTAAAAAGAAGCAAAGAAAGGCAAAACAGCCATGTTTA
AAATATTGGAGTTTTACAAGGAGCATTGAGGGTCACCCACAAGAGGAAATGGAAGTAAAAGTGAAGAACTCTTTC
TTCACTGGAGATTCTCCTTCAAAAGAACTTCTCTGCTTTACAGTGAAATAGTCTGTACTTAGTTTCCGCAGGGGA
AGCCACACCCTTGTAACCATGCTTCTCAAACTCTTAGTGTCTGTTCCTGAGGGGCATTCAAAGCCAAGGGATAAA
CATGGCACATTTTCCTAGAGGAGAGGGTAAGAAATATCACTGACAAATTTTAATACTAAAATAGTTATGGAATAA
AATGTAAATTGCATGAGTCTTAACGATACAACATAAGACTTAGAAGAAATATTGTGTGGACCTGGGCCTACACCC
CAGACAGATACCTCAGGGGTACATATGCTCTCCTTCTGTTACAGCTACTTCTAGGGAAAGGTTCGAGAAGTAGTA
CCTTAAAGAACATATCAGAGACAATTTTTTTTATTTTTACTATGAACAAGTTATCCAAAATTTATTCTGGGCAAA
CAGAAAAAAAAAGGGAGCAAATATTAATTTGTAGATGCAATTACTATTTTCCTTTGTTTACTGATTTAACTCTTT
GGGTTTAAGATATGGAAATCTTCCTCCAGTTTATTCTGTACACCTCCATAAAAGCTCCATTAAAGGCTTATTCGT
ATGTCTCCAAGGCCTTGACAAATGTAGCCATCAACCTTATACAGATACATGCTGTGAGAAAAACATTTGACAGTA
TGCAATTTGCATATACCTGATCTTCCATTCTCTCTGTGCCTTCTAAGATAATCTTCTGGACATTTTCTTGTCTTT
CCTGAGCAAGAGAAAATTTATTTAAAAAAACAACCCACAACATTTTGATACTTGCTTATTTTTCAATAGACATGT
TCTTGTGTAGTAATTTAGTTCACAAGAAAAATACTTTCTACTTTAGGGAAAAAATGGGGGCAGGGGTAGGAAATT
AACCCAACAAATGCATGTTCTCATAAACAATACAAAATAAAATCAAAACAACCTTTATTCTGCAGTGAAAAAAAG
ATAACTTCACAGAAAACAGTCAATGTAACATCTGCATAGTTTCAAAAAGGAAAAGAATGACTTGCACTTTTCAAA
TTAAACATTATGATGTTGTTTAAAAGATTCTCCTGATTTTAAGAGTTTCATAATGTGAGAAAAAAGGAAGTAAGC
CTGCAAACATAGTAAAAAATTATTCTTTTAAAAGATATTATTTTTCCTTACTATTGGGCAAAAGCCTTTTAAAAC
TGGTAATGCTTAATGGACTTTCAGGTTAGTATCAAACTGGAACACAGGAAGGAGAATTCAATGTGTTCTTTAGAT
ACATCAAAACTATACTGAAATGTAAATAGCATTATATATTCAACTACAGGATTTAGGAAAACAATAATTTCTGTA
AGATTAAAAGGAATTCTCTTGGGAACCATTCCATTCAACCTCCTCATTTTATGAACCTGGGAACTTGGCAAAGAG
GTTAAAGAGACCAAAGGCTACATGACCAACAGCTTATGAAACTATTACTTTGAACTGTTATACTTACACATAGTA
GTAAGCAAAAGACAGAATTGTGCAATGAAAGGGAAACAAAAGGTATTAGAGTCAAAGGCTCCCAAGAAGAATCCA
GGGTCTAAAAGTTTCTTTATTTGTCTAAGCTTTAGCTTTTCATCTATAATGTGGAGCTACCATTTCGTACCTTCC
ACAGTTAATATGAAGATGACAGGTATCAGACCAGATGTATTTGTATCTAATAGGGTAAATGCAAAATAAATAACA
TTTATTGTTTGATGTTCACTGCATATAATTAAAAAAATAAGATTTATATGTACCAGAAAATAAGCTTTCAACAGA
TAGGTTAACATGATTAATAAGCTGAAAAATCACTTACCTTATGCATCCATATTCTTCCTTTCCGGATTATATGTG
TTAATCTATCAACACACACTCTATGAAGTGGGAGGTAGAAACTAAGTTCTGTCTGTGGAAGTATAATTGATAGTC
CATATGTGCTGCGATCCCCATTCCAGTTTCCATCAAAGATTAATGAAACAATAATCACTCCCTTTTCAGACAAGA
CAAAAAACTTTACATCTATAGCACCACTCTCTGCATTTCGAAGGATTTCTCCATTTAGAGTGTGGTTGGCAAGAA
AAGTTATTTCTCCATCACTGAGAAGTACCTGTTCTGTCTTTGGAGCCCAAATGTGCCTTACTCTAGGACCAAGAA
TATTGTCCCAGTAAGCAAAAGTAGCTGCTAATAAAGGTGATTTGCCACTTAAAGCAATCTCTGTCTTGGCAACAG
CTGGAGATGGCGGTGGGCAAAGAGTCGACATCACTGCATTCCAACTGTCACATTATCCAAATGCTCCGGAGATAT
CTAAACAATGACATATGAAACCAATGATTAGGTTCAGCAATTTAAAGATATCCATCAAAACCCCAAATGATTTAG
ACATATTTGGTTTGTCCTCTTAAGTCAAAGATGTGGAATCCTGTTATCTCCTATCAGGATAAAGACATTCAACTA
GCACAGTAGGTGCACATTAAATGTTTGTTGATATGATCATTTTACAAGACATGGTAACTTGTTACTTATATTCAG
GGCATACATTTAGAAATTCAAAGAAATAACTTAAAAAAGGGCTTCTTTACACTGATATTAAATGTTACATACTAA
AGCTCATAGAATAGACCCGCAGTATTCCCAAATATCCAGTCCATGTGCAATTCTAGTATGACTGGAGATTTGGCC
CCTAACCCATAGCAACTAAAAAGGAGAAAAACAGGAAGGGAAAGGCTCAGCTAGAGACTGACACTTGTGGGTTGA
ATTGTGTCCCCCAAAAAGATATGTTCAATTCCTAACCCTTGGTGTACGTGAATGTGACCTTATCTAGAAATAAGT
GTAATCATGTTAAAATGGGGTCATACTGGATTAGAGTGGGGCCTAATCCAATAACTGCTGTGTTTATAAGGAGAG
AGATTTGGAGACACAGAGACAAATGGTAGACAGCCATGTGAAGACAAAAGGCAGATACTGGATTGTTGAAACTAC
AAGGCAAGAAAGGAACACTCAGGATTGCTGGTAACCACCAGAAGCCAGGAAGAGGCAAGGAAAGAGTCTTCTCTC
TTGAAGATCATGCCCCTGTCAACACTTTGATTTCGGACTTCTAGCTTCTAGAATTGTGAGAGAATAAATTGCTGT
TGTTTAAAGCCACTCAGTTTGTGGTGCTTTGTTAAGTAATCTTAGAAAAGTAATACAACACCTAACAACAGAAAT
ACTTTAAAGCCGCTAAAAGGTCAAAAAAAAAAAAAAAAAAAAAGACATGGAAATACCACAAGTCTGGAGCCATAA
CAAAAAATGGGCAAACAGTCCTGTATCCTCAGTGAACTCTCTGGTTATGAGAATACTGAAGCCCGATCCTGATGT
TTAAAACGACATTGAAGTATCAAGACAAAGATAAAAATATTTAATATGCTAGCCAAGAAACCAATACAGCATTTC
ATCACTGCAAAGAGAGTTCTACACTAAATGGCTAGAATTTAAAAGCTTTAGTTATTTAGAACACGTAGAAAACAG
AAGGGCTAAATAGGGCCCGTTCAAGCCTTTGAATTTAATGAGAAAACAGACATGAGGAGAAGAACATAAACGCTC
ACATCCAAGACAGAACCCAGGGCTCTTGGTCCCCTTGCTCAACTTGTACATCTTAATCCACATAAACATACCACT
CTAAAAAGGTACATCCTATGTGATATTAATGTAAAACAAATCATTCTTGCAAATACAGTTATGTGCCATGTAACG
TTTCAGTCAATGGTAGACTGCATATATGATGGTAGTCCCATTAGATTACAATGGACCTGAAAATATGCTATTGCC
TTAGTGACACTGTAACCATCATAAGGTCTTAGTACTATTTTGCAAGTTATTTAAAGTATAGCACATACAATTATT
ACAGTGTACAACACTTGATAATAAACTACTACATTGCTGGTTTATGTATTCACTATACTATGCCTTTTATTGTTA
TTTTAGAGTGCACTCCTTCTACTTTTTTTTTTTTTAAGTTAAATGTAAAACAGCCTCAGGCAAGTCCTTCAGGAG
GTATTCAACAGAAAGCACTGTTATCATAGGTGACAGCTACATGTGTGTTATTGCCCCTAAAAACCTTCCAGTGGG
ACAAGATGTGGAGGTGGAAGGCAGTGAGGTGGAAGGGAGTGATACTGATGATCCTAATCCTGTCTATGCCTAGGT
GAAAGTGTGTGTGTTTTAGTTTTTAACAAAAACGACTAACAAGTAAAAAAAAAAATTTAAAATAGAAAATAGAAA
AAAGCTTCTAGAATAAGGATACAAAGAAAAAATATTTTTGTATAGCTATACAATGTATTTGTGTTTCAAGCTAAG
TATTTTAAAAGTTAAAAAATTAAAAAGTTTACAAAGTTAAAAAGTTATAATTTTTTATTGAAGAAAAACTGTTAA
GATAAATTTGGTGTAGCTTCAGCGTACTGTGTTTATAGTCTACAGTGGTGTACAGTGTTCTAGGCCTTCACATTA
ATTCACCACTCACTCACTGACTCACCCAGAGCAACTTCTAGTCCTGCAAGCTCCATTCGTGGTAAGTGGCCTACA
CAGGTATACCATTATCTTTTATACCATACTTTTACTGTACCTTTTCTCTGTTTGCATATATTTAGATAAATATTT
ACCACTGTGTTACAACTGTCTATAGTATTCAGTACAGTAACAGTTGTACAGGTTTGTGGCCTAGGAGCAACAGAC
TATACCATACGGCCTAGGTACATAAAGGCTATACTATCTAGGTTTGTGTAAGTACACTCTATGATGTTTGCATAA
TGACAAAATCGCCTAATGATGCATTCCTAAGCAATGTGTGATTGTACTATAATTGAAGACTTGTTATCTAAGACT
GAAAGTAAAAAGAATTGCAATTTCACCTAAGCAAGTCTAAAACTGTGAAGTCTATTTATAATAATAGCAATACAA
AGCAGCTAATAGGCAAACTATGATATACCTATCTTTGCCATATGATTGCTTTGGGAGCTAACATTTGATCTGTAA
ATGTATGACAAAGTAAACAATTTTACTTAAAGAATTTCATCCACATCTTGTCAAGAGAGTTCAGTCTGATGGAAA
GCACTGACTTCTATTTACAGAGCATTAGATGAGTGCTTTTATCATATTATGAGTAGGCATACAGAGCCTGGCAAA
ACAGTTAACTCTAAGTATGTACAGAAATGGTTGAACACAACGACAGTTTTAACACGTGTATTTGTAATTTCAAAA
ATTCATTTAGGTAATATTTACTTTTAAATATGTTGTATCAATTTAATAGTCTTAAGAGACAGCACTAGATATAAG
CCGTACAGCTTCTTTAAAATATCCACTGTTTTTAATACAATGTAAGCAGTCAGTTTACAATGATCAAATATAGGA
ATGTAATCTGAATTGAAATGGTAATGACACTACTGCTGTCATAACTAACAACAGCAAACTGGAGGCCAACATAAT
GAATTAAGTTAACATACAACCATAAAATTATATTGCAAACATATTTTTCTTTCATTCTTTTAGGTTAAAAAGGTG
GATAATCATAAAGGCAATATTACAACTCTAATATTTCATCATTAAACTGAAAATAAAAGTATTTCCTAAAACAGA
ACTGAACCCTGGAGCAAAATCTGATTGAATTATAGGGAAACTTTTACCACGTTGTGAAAATTGAACTATTATACT
GCTAGTTACACTCTCACTCCTAACAGAATAAGAAAAAAAAAATGGGCCGGGCATGGTGGGTCACACCTGTTATCC
CAGCTCTTTGGTAGGCCGAGGCAGGTGGATCACCTGAGGTCAGGAGCTCAAGACCAGCCTGGCCAACATGGTGAA
ACCCCACCTCTACTAAAAATACAAAAAATTAGCCGGGTGTGGTGGTGGACACCTGTAATCCCAGCTACTCGGGAG
GCTGAGGCAGGAGAATCTCTTGAACCCGGAGGTGGCAGAGGTTGCAATGAGCTGAGATGGCGCCACTGCACTCCA
GCCTGGGCGACAGAGAGAGACTCTGCCTCAAGAAAAAAACAAACAAACAAACAAACAAAAAGAATAAGAAAGAAA
ATGAAGGACAAAGATCATACTGAATTGCTTAGTTTTAAATCCTACCAAAAGAAATAGCCTGGGAAATGAAATGTC
ACAGAGAAGTATAATCAGGAGAGCTGTACAATTATTTTACTAATACTTGAAGTCATCGTCTTTGGTGAGAAAAAT
CCATACATGCAAATGCAGCTGAAAAAAATCAGCTCAAAACCAATAGTTGTTTATGTACCTATCTTACGTACATGT
AGTGCTGTCTACTCCAGAGAGTTACCAAACATTAGCCAGTCTTTTGAGGGAAGCCAAGATTCAAATTGAGTGAGA
CGGTGGCTTGCTCACAGGGTTCATGAGAGGTTTCCCAATACACTTTCTGGAAATAATCCCATACATGCAGACATG
ATTACATTAATTAACATCTGCTAAAACTGTTAGTAGAGTGCTAAGTTTGAGGTTTTGCTTTTTCTTTAAACGTCT
GTTAAAAAATCAACCATCTCTTCCCTGATTGGTATTTAGAAAGGTGGTTGGTCCACTGCTATTGTAGTGAAAATT
CTACAATCATAAAGCCCTCACTTCTTGTTTTTTAGAGACAGGGTCTCGTTTTGTCATCCAGGCTGGAATGCACTG
GCAGGATCATAGCTCTCGGTAACTTCAAACTCTTGGGCTCAAATGACCCTCCTGCCTCAGCCTCCCAAGTAGCTA
GGACTACAGGTGCACATCACCACGCCCGGCTAAGTTTTTAATTTTTTGTAGAGACAGGGTCTACGTTGCCCAGGT
TGAGCTTGAACTCCTGGCTTCAAGTGATCCTCTTGCCTCCGCCTCCCAAAGCTCTGGCATTACAGGTGTAAGCCA
CCTTCTCCAACCTGGCTCTCAATACTTGTAACCATGCTGTTTATTTTCTCCCAGCCCAAAGAGAAGCAGGATCCT
AAACCGTCCACTTTCCACAACAGGAGCTGCCCAGGACCACTTCAAGGACAGTGAACTGTTTACAGTACCAGAAAG
TTCACAACACTTTCTCAATCTTCAACATCAGGGAAGACTGGAAGGTGAAGTTCATATCACTATCTGGCCATTTCT
CACAGTTCCAAGTTTCTCAGACAATAGGTAGGCTAACCTAGTCCTCCTGGGAACTATCTAATTAACGTAGAATAG
AACCCGAGGGCAGACTTGAAAAACAGAAGTCCTCCTTGGTTTACTTTGTTTCTCTGAAAGCAAATTGTGGAGTGC
CAACATAGCCAAACAAAATATTTTATCAACTTCATAAGGTGCTTGTAATTTTTTCCTGGAGCAGGTAAATGCTGG
CTTAGTGAACAATCTGGAATGTGGTAATTACTCTCGTTCTTGTTTCAGATGTACTATCAGCATGTAGCAGTTTCC
AACTGATTCAGGGTTTTCCTAAAGTGGCAGGCCTTGGCAGAGGTGGTGACAACAATGCCCGTGTCAAATGACACC
GTATTTCAAGTATTCTGACTCCAGGTTATTAATATCCCCTATATGATAGTCTTGTTTCTGTGATATTCACAGATT
ATGTTAAAAGTTTCCCAAAGTCTGAGAAAAATCATATCTTAACAGTATCTTTTTTTTTTTTGATCCTTTGTACAA
AAGTAGAAGTAATGCCAGACAGATTACGTACCCTTGTTGTGAACAACTGGTGCATGGCAACTGTTTGAATAGAAA
TTTACCAACTGCCACAACCAGGCAACTACTCTCCCAGAGCCTAACAATCTCGATTGCATCTGAAAGGGCCACCCC
TCCTGGGAAAGTGCAGGACCTCCCTCCTGTTTCTGAATACAAAGCCTGGTGGTGTTCAACGCGGCCAGATAGACC
CAATGAGCACACGGACATGTAATCTGTGCACTTCTTTAGACAACTGATTACCATCAGTCAAGTGATGCCCAAGTC
ACAATAGTCACTTCCTTTAAGCAAGTCTGTGTCATCTCGGAGCTGTGAAGCAACCAGGTCATGTCCCACAGAATG
GGGAGCACACCGACTTGCATTGCTGCCCTCATATGCAAGTCATCACCACTCTCTAGAAGCTTGGGCTGAAATTGT
GCAGGCGTCTCCACACCCCCATCTCATCCCGCATGATCTCCTCGCCGGCAGGGACCGTCTCGGGTTCCTAGCGAA
CCCCGACTTGGTCCGCAGAAGCCGCGCGCCGCCCACCCTCCGGCCTTCCCCCAGGCGAGGCCTCTCAGTACCCGA
GGCTCCCTTTTCTCGAGCCCGCAGCGGCAGCGCTCCCAGCGGGTCCCCGGGAAGGAGACAGCTCGGGTACTGAGG
GCGGGAAAGCAAGGAAGAGGCCAGATCCCCATCCCTTGTCCCTGCGCCGCCGCCGCCGCCGCCGCCGCCGGGAAG
CCCGGGGCCCGGATGCAGGCAATTCCACCAGTCGCTAGAGGCGAAAGCCCGACACCCAGCTTCGGTCAGAGAAAT
GAGAGGGAAAGTAAAAATGCGTCGAGCTCTGAGGAGAGCCCCCGCTTCTACCCGCGCCTCTTCCCGGCAGCCGAA
CCCCAAACAGCCACCCGCCAGGATGCCGCCTCCTCACTCACCCACTCGCCACCGCCTGCGCCTCCGCCGCCGCGG
GCGCAGGCACCGCAACCGCAGCCCCGCCCCGGGCCCGCCCCCGGGCCCGCCCCGACCACGCCCCGGCCCCGGCCC
CGGCCCCTAGCGCGCGACTCCTGAGTTCCAGAGCTTGCTACAGGCTGCGGTTGTTTCCCTCCTTGTTTTCTTCTG
GTTAATCTTTATCAGGTCTTTTCTTGTTCACCCTCAGCGAGTACTGTGAGAGCAAGTAGTGGGGAGAGAGGGTGG
GAAAAACAAAAACACACACCTCCTAAACCCACACCTGCTCTTGCTAGACCCCGCCCCCAAAAGAGAAGCAACCGG
GCAGCAGGGACGGCTGACACACCAAGCGTCATCTTTTACGTGGGCGGAACTTGTCGCTGTTTGACGCACCTCTCT
TTCCTAGCGGGACACCGTAGGTTACGTCTGTCTGTTTTCTATGTGCGATGACGTTTTCTCACGAGGCTAGCGAAA
TGGGGCGGGGCAACTTGTCCTGTTCTTTTATCTTAAGACCCGCTCTGGAGGAGCGTTGGCGCAATAGCGTGTGCG
AACCTTAATAGGGGAGGCTGCTGGATCTGGAGAAAGTGAAGACGATTTCGTGGTTTTGAATGGTTTTGTTTGTGC
TTGGTAGGCAGTGGGCGCTCAACACATAATTGGTGGATGAAATTTTGTTTTTACCGTAAGACACTGTTAAGTGCA
TTCAAAACTCCACTGCAAACCCTGGTAGGGGACAGCTCCGGCACTGCGGGCGGGAATCCCACGGTCCCCTGCAAA
GTCATCGCAATTTTGCCTTTACATGTAAGAATTCTCTCAAGCATGATTTTCACACTGGGGAATGTCATTTTTGCT
AGTTGCAATATGTGGATGAGTTGTTTTTTTTTAACTTTTGAAAAACGTACCATTCTGTTTGATGTGTAAAAAACA
CAAAGATTTTTGAAACCTTGCGTCTTTTGGTCTGCAGGTGTATAGATTCCACTTACTACAGATGAGTAGCATTTA
CACCACTCAGATGTGTAAAAAAACAAAGGTTTTTTAAACTGTGTGCCTTTTGATCTGCAAGTGTGAGATGGCACT
TACTACAGTGAGTAGCATTTAATCTTTTTCATCACTAAAAATCACACAGAACGTTTTAATCATTCACCGAGGAAG
AAAGGGAGGAATAAATACACAAAATGGCTCTCAACGTCTACACCTTCTGCAGAAACAGACCCTTTTCCTACTGTT
CTATGCTTTGTGAAAGTTGATCATACAAATTGGGTCATTCTTTTTATACCCAACTAAAATAGTGGGGGTAGGGGG
TAGAAAAGCACTTAGGACAAATGACACTGCTCCCACAGTGTAATTCTCTCCAAGTCCAGCTGCTGCAACTGCCCG
TTGTGACCTGAGACCAGTTTTATCTAATAGTTGCTAAAATGACCTGCTGCAGCTCTAATTTTATCTACCACCATC
ACTCACCAGTTGAAACTCACCAGCTCCTCAGATCCTTAATAGTGCCAATGAATTTTCTCAAAGAGCACTATGTAA
CATTTCTCTTTTTTAACAAAACCTCCCCCTTTTCTTTGTTGTGTGGATATACCGAAGACCATCTGATCTACATGT
ATGCCCTAATTGCAATTCTTTCTTCCCAAATAAATCACTTAATTTAGAGATTCATCTCTGTATTTTTATTTTGAC
TGACAGCTTATAACAAGTAGCTAGCATTTACCAAGTTTCTACACTGAGTTGTACTTCACTTATACGTGGAATTAA
AAAACAACTGAATTTATAGAAACAGAGTAGACCCTTGGTTGGGGGGCTTGGGGGGAAAGAAAATTGTAGGGTAGG
GTACAAAGTTGCAGTTACGTCTAATACATCTAGAGATTTAATGTACAACATGAGGACTAGCGTTAATAATTGTGT
TAGTCCATTCTTACACTGCTATAAAGAAATAACTGAAACTGGGTAATTTATAAAGAAAAGTTTAATGGCTCACAG
TTCTGCAGGCTGTACAAGAAGCATGGCTGGATCAGCTTCTGGGCAGGCCATAGGGAACTTAAAATCATGATGGAA
GGCATAGGGAGACCCCAGACTTCACATGGCAGGAACTGGGGGAAGAGAGAAATGGGAGGTGCTACATACGTTTAA
ACAACTAGATCTTGTCAGAACTCACTATATAGTACCAAGAGGGGACTGTACAAAACCATTAGAAGCCACCCCATA
ATCCACTCACCTCCCACCAGGCCCAACCTCCAACACTGGGGATTACAGTTGAACATGAGATTTGGGTGGGGACAG
AGATCCAAACCATGTTATTCCAACTCTGGCCCCTCCCAAATCTAATGTCCTTCTCATATTGCAAAATACTGTCGT
GCCTTACCAACAGTTCCCCAAAGTCTTAACTCGATCCAGCATTCATTCAAAAGTCCAAAGTCCCAAGTCTCACCT
GAGACGAAGCTAGTCCCTTCTACCTATGAACCTGTAAAATCAAAAACAAGGTAATTGCTTCAAAGATACAATGGG
GGTATAGGCATTGGGCAGATACTGCCATTCCGAAAGGGAGAAATCTGCCAAAAGAAAGAGGCTATAGGGCCCCAT
TGCAAGTCTGAAAGCCAGCCGGGCAGTCATTAAATGTTAAAGCTCTGAAATAATCTCCTTTGACTCACACCCAGG
GAACACTGATGCAATGAGTGGGCTCCCAAAACCTTGGGCAGAACCACCCCTGTGGTTTTCCAGGGTTCATCTCCC
ACAGCTGCTCTCATGGGCTAGCATTGAGTGCTTGCAGCTTTTCCAGGCTGCAGGGTGCAAGTTGTTGGTGGATCT
ACCATTCTGGGGTCTGGAGGACGGTGGCTGTCTTGTCATAGCTCTGCTAGGCAGTGCCCCAGGGGACTCTCTGTG
GGGGCTGCAACCCCACATTTCTTCTCCTTGCTTCCCTAGTAGATGTTCTCCATGAGGATTCCACCCCAGTAACAG
GCTTCTGTCTGGACATCCAGGCTTTTTCATACATCCTCTAAAATCTAGGCAGAGCTTCTTAAGCCTCAACTCTTG
CATTATGTGCGCCCGCCGGCTTCACAGCTTATGGAAGCCACCAAGGCTTATGCCTGGCACCCTGTGAAGCAGCAG
CCTGAACTGTATTCTTACTGGTGAAAGTTATCTGAGTTACCAGCTGCAAATCCATGTGGGTCTGCAGCAACCTCA
ATTCTTGCCTCCTCAGAAGAAAGAATTTGACCAAGAGGCATAAGGCAGAAAAAGAGACTGCGACAAGTTTCAGAG
CAGGAGTAAAAGTTTATTAAAAAGCTTTAGAACAGGAATGAAAGGAAAGTACATTTGGAAGAGGCCCAAGTGGGC
ACCTTGGAGGTCAAGTGCCCTGTTTGACCTTGAACCTAGGATCTTATACACTGGCCTACTTCTGACATCTTGTGC
CCCTTTCCCTTGGTCCTTCCCTAAGGGTGAGCTTGCCGCATGCATGGTGCCCTGCTTGCACTTGGAAGGTGAGCG
TGTGCAGTGTGTTTACTGGAGTTGTATACATGCTTACCTGAGGCTTTCTTCCCTTTTCCGGTGGAATGCCCCCAA
AGGTCATACTTCACCATTTTGCCTCTTAATGTGCATGTTAAGCCCACTCTCTCAGTTCCTGAGATCTTATTGGAA
GCGCCCAGTTACCAATTTCAGGTGTTTCTATCTATTGAGAAGTTGCCTCTCCCTGGTGCTGGCTGCAACCAATTA
CTATTTTAGAGAGGCAGTATGACAACTGCCTGACCATCATCTGATGGTTGCCTGACATTCCTGGTGGGTGGTGGG
GACTTCTCTCTTACCCCACTCATGCCTGATTAGCTACCTACTGTAACAGTACCTGGGCCCCTTTGAGCAGCTGGG
ATTCAGGGAGCAGAGTCCCAAGGCTGTAAGAGGGAGCAGGGGCCCTAGGCCTGGCCCAGGAAATGATTCAGTCCT
CCTAGGCCTCGGGGCCTGTGATGAGAGGGACCACCATGAAAGCCTAAAATGCCTATTAGGAACACTTTTACACTG
TTGGTGGGACTGTAAACTAGTTCAACCATTGTGGAAGTCAGTGTGGCGATTCCTCAGGGATCTAGAACTAGAAAT
ACCATTTGACCCAGCCATCCCATCACTGGGTATATACCCAAAGGACTATAAATCCTGCTGCTATAAAGACACATG
CACACTATGTTTATTGTGGCACTATTCACAATAGCAAAGACTTGGAACCAACCCAAATGTCCAACAGTGATAGAC
TGGATTAAGAAAATGTGGCACATATACACCATGGAATACTATGCAGCCATAAAAAATGATGAGTTCATGTCCTTT
GTAGGGACATGGATGAAATTGGAAATCGTCATTCTCAGTAAACTATTGCAAGGTCAAAAAACCAAACACCACATG
TTCTCACTCATAGGTGGGAATTGAACAATGAGAACACATGGACACAGGAAGGGGAACATCACACTCTGGGGACTG
TTGTGGGGTGGGGGAGGGGGGAGGGATAGCATTAGGAGATATACCTAATGCTAAATGACGAGTTAATGGGTGCAG
CACACCAGCATGGCACATGTATACATATGCAACTAACCTGCACATTGTGCACATGTACCCTAAAACTTAAAGTAT
AATAATAATAAAATAAAAATAAAATAAAATAAAATGCCTGTTAGTCCTATGAGTCTTTCTCCCCATTGTTTTGGT
TATCAGCCCTTGCCTTCCTTTTAGTTATGCAAATTTATGCAGCCTGCTTGACTTCCTCTCCTGAGAACGAGCTTT
TCTTTACTACCACATGGCCAGGCTGCAAAATTTACAAACTTTTATGCTCTGCTTCCCTTTTAAGTGTAAGTTCCA
ATTTCAGGTCATTTCTGTGCTCATGCCTATGAGCATAGGCTATTAGAAGCAGCTAGGTTACTTCTTGAACACTCT
GCTGCTTAGAAATTTCTTCTGCCAGATACCCTAAATCATCATTCTTAAGTCTAAGATTTCACAGATCCCTAGAAC
AGAGGAACAATGCAGCTAAGCTCTTTGCTAAAGCATAGCAAACCTGACCTTTACTCATTCCCAATAAATTTCTCA
TTTCCATCTGAGACCTCCTCAGCCTGGACTTCACTGTCTATATCACTATCAGTATTTTGGTTACAACCACTCAAC
AAGTTCCTAGCGAGTTCCAAACTTTCTCTCATCTTTCTGTCTTCTTCTGAGCCCTCTAAAATGTTTCAACTTCTG
CCTGTTAGCCGGTTCCAAAGTCACTTCTACATTTTCAGGTATCTTTATAGCAATGCCCTTCTTCTCAGTAACAAT
TTTCTGTATTAGTCCATTCTTGCATTGCTATAAAGAAATACTTGAGACTGGGTAATTTACAAAGAAAAGAGGTTT
AATTGACTCATGGTTCTGCAGGCTGTATAGGAAGCATGGCAGCATCAGCTTCTGGGGATGCCTCAGAGAACTTAC
AA
>SEQ ID NO: 17 nucleotides 3127-5607 of NG_031977.2
GAGTTGGAATAACATGGTTTGGATCTCTGTCCCCACCCAAATCTCATGTTCAACTGTAATCCCCAGTGTTGGAGG
TTGGGCCTGGTGGGAGGTGAGTGGATTATGGGGTGGCTTCTAATGGTTTTGTACAGTCCCCTCTTGGTACTATAT
AGTGAGTTCTGACAAGATCTAGTTGTTTAAACGTATGTAGCACCTCCCATTTCTCTCTTCCCCCAGTTCCTGCCA
TGTGAAGTCTGGGGTCTCCCTATGCCTTCCATCATGATTTTAAGTTCCCTATGGCCTGCCCAGAAGCTGATCCAG
CCATGCTTCTTGTACAGCCTGCAGAACTGTGAGCCATTAAACTTTTCTTTATAAATTACCCAGTTTCAGTTATTT
CTTTATAGCAGTGTAAGAATGGACTAACACAATTATTAACGCTAGTCCTCATGTTGTACATTAAATCTCTAGATG
TATTAGACGTAACTGCAACTTTGTACCCTACCCTACAATTTTCTTTCCCCCCAAGCCCCCCAACCAAGGGTCTAC
TCTGTTTCTATAAATTCAGTTGTTTTTTAATTCCACGTATAAGTGAAGTACAACTCAGTGTAGAAACTTGGTAAA
TGCTAGCTACTTGTTATAAGCTGTCAGTCAAAATAAAAATACAGAGATGAATCTCTAAATTAAGTGATTTATTTG
GGAAGAAAGAATTGCAATTAGGGCATACATGTAGATCAGATGGTCTTCGGTATATCCACACAACAAAGAAAAGGG
GGAGGTTTTGTTAAAAAAGAGAAATGTTACATAGTGCTCTTTGAGAAAATTCATTGGCACTATTAAGGATCTGAG
GAGCTGGTGAGTTTCAACTGGTGAGTGATGGTGGTAGATAAAATTAGAGCTGCAGCAGGTCATTTTAGCAACTAT
TAGATAAAACTGGTCTCAGGTCACAACGGGCAGTTGCAGCAGCTGGACTTGGAGAGAATTACACTGTGGGAGCAG
TGTCATTTGTCCTAAGTGCTTTTCTACCCCCTACCCCCACTATTTTAGTTGGGTATAAAAAGAATGACCCAATTT
GTATGATCAACTTTCACAAAGCATAGAACAGTAGGAAAAGGGTCTGTTTCTGCAGAAGGTGTAGACGTTGAGAGC
CATTTTGTGTATTTATTCCTCCCTTTCTTCCTCGGTGAATGATTAAAACGTTCTGTGTGATTTTTAGTGATGAAA
AAGATTAAATGCTACTCACTGTAGTAAGTGCCATCTCACACTTGCAGATCAAAAGGCACACAGTTTAAAAAACCT
TTGTTTTTTTACACATCTGAGTGGTGTAAATGCTACTCATCTGTAGTAAGTGGAATCTATACACCTGCAGACCAA
AAGACGCAAGGTTTCAAAAATCTTTGTGTTTTTTACACATCAAACAGAATGGTACGTTTTTCAAAAGTTAAAAAA
AAACAACTCATCCACATATTGCAACTAGCAAAAATGACATTCCCCAGTGTGAAAATCATGCTTGAGAGAATTCTT
ACATGTAAAGGCAAAATTGCGATGACTTTGCAGGGGACCGTGGGATTCCCGCCCGCAGTGCCGGAGCTGTCCCCT
ACCAGGGTTTGCAGTGGAGTTTTGAATGCACTTAACAGTGTCTTACGGTAAAAACAAAATTTCATCCACCAATTA
TGTGTTGAGCGCCCACTGCCTACCAAGCACAAACAAAACCATTCAAAACCACGAAATCGTCTTCACTTTCTCCAG
ATCCAGCAGCCTCCCCTATTAAGGTTCGCACACGCTATTGCGCCAACGCTCCTCCAGAGCGGGTCTTAAGATAAA
AGAACAGGACAAGTTGCCCCGCCCCATTTCGCTAGCCTCGTGAGAAAACGTCATCGCACATAGAAAACAGACAGA
CGTAACCTACGGTGTCCCGCTAGGAAAGAGAGGTGCGTCAAACAGCGACAAGTTCCGCCCACGTAAAAGATGACG
CTTGGTGTGTCAGCCGTCCCTGCTGCCCGGTTGCTTCTCTTTTGGGGGCGGGGTCTAGCAAGAGCAGGTGTGGGT
TTAGGAGGTGTGTGTTTTTGTTTTTCCCACCCTCTCTCCCCACTACTTGCTCTCACAGTACTCGCTGAGGGTGAA
CAAGAAAAGACCTGATAAAGATTAACCAGAAGAAAACAAGGAGGGAAACAACCGCAGCCTGTAGCAAGCTCTGGA
ACTCAGGAGTCGCGCGCTAGGGGCCGGGGCCGGGGCCGGGGCGTGGTCGGGGGGGGCCCGGGGGCGGGCCCGGGG
CGGGGCTGCGGTTGCGGTGCCTGCGCCCGCGGCGGCGGAGGCGCAGGCGGTGGCGAGTGGGTGAGTGAGGAGGCG
GCATCCTGGCGGGTGGCTGTTTGGGGTTCGGCTGCCGGGAAGAGGCGCGGGTAGAAGCGGGGGCTCTCCTCAGAG
CTCGACGCATTTTTACTTTCCCTCTCATTTCTCTGACCGAAGCTGGGTGTCGGGCTTTCGCCTCTAGCGACTGGT
GGAATT
>SEQ ID NO: 18 Reverse complement of SEQ ID NO: 17 (hg38_dna
range = chr9: 27573260-27575740)
AATTCCACCAGTCGCTAGAGGCGAAAGCCCGACACCCAGCTTCGGTCAGAGAAATGAGAGGGAAAGTAAAAATGC
GTCGAGCTCTGAGGAGAGCCCCCGCTTCTACCCGCGCCTCTTCCCGGCAGCCGAACCCCAAACAGCCACCCGCCA
GGATGCCGCCTCCTCACTCACCCACTCGCCACCGCCTGCGCCTCCGCCGCCGCGGGCGCAGGCACCGCAACCGCA
GCCCCGCCCCGGGCCCGCCCCCGGGCCCGCCCCGACCACGCCCCGGCCCCGGCCCCGGCCCCTAGCGCGCGACTC
CTGAGTTCCAGAGCTTGCTACAGGCTGCGGTTGTTTCCCTCCTTGTTTTCTTCTGGTTAATCTTTATCAGGTCTT
TTCTTGTTCACCCTCAGCGAGTACTGTGAGAGCAAGTAGTGGGGAGAGAGGGTGGGAAAAACAAAAACACACACC
TCCTAAACCCACACCTGCTCTTGCTAGACCCCGCCCCCAAAAGAGAAGCAACCGGGCAGCAGGGACGGCTGACAC
ACCAAGCGTCATCTTTTACGTGGGCGGAACTTGTCGCTGTTTGACGCACCTCTCTTTCCTAGCGGGACACCGTAG
GTTACGTCTGTCTGTTTTCTATGTGCGATGACGTTTTCTCACGAGGCTAGCGAAATGGGGCGGGGCAACTTGTCC
TGTTCTTTTATCTTAAGACCCGCTCTGGAGGAGCGTTGGCGCAATAGCGTGTGCGAACCTTAATAGGGGAGGCTG
CTGGATCTGGAGAAAGTGAAGACGATTTCGTGGTTTTGAATGGTTTTGTTTGTGCTTGGTAGGCAGTGGGCGCTC
AACACATAATTGGTGGATGAAATTTTGTTTTTACCGTAAGACACTGTTAAGTGCATTCAAAACTCCACTGCAAAC
CCTGGTAGGGGACAGCTCCGGCACTGCGGGCGGGAATCCCACGGTCCCCTGCAAAGTCATCGCAATTTTGCCTTT
ACATGTAAGAATTCTCTCAAGCATGATTTTCACACTGGGGAATGTCATTTTTGCTAGTTGCAATATGTGGATGAG
TTGTTTTTTTTTAACTTTTGAAAAACGTACCATTCTGTTTGATGTGTAAAAAACACAAAGATTTTTGAAACCTTG
CGTCTTTTGGTCTGCAGGTGTATAGATTCCACTTACTACAGATGAGTAGCATTTACACCACTCAGATGTGTAAAA
AAACAAAGGTTTTTTAAACTGTGTGCCTTTTGATCTGCAAGTGTGAGATGGCACTTACTACAGTGAGTAGCATTT
AATCTTTTTCATCACTAAAAATCACACAGAACGTTTTAATCATTCACCGAGGAAGAAAGGGAGGAATAAATACAC
AAAATGGCTCTCAACGTCTACACCTTCTGCAGAAACAGACCCTTTTCCTACTGTTCTATGCTTTGTGAAAGTTGA
TCATACAAATTGGGTCATTCTTTTTATACCCAACTAAAATAGTGGGGGTAGGGGGTAGAAAAGCACTTAGGACAA
ATGACACTGCTCCCACAGTGTAATTCTCTCCAAGTCCAGCTGCTGCAACTGCCCGTTGTGACCTGAGACCAGTTT
TATCTAATAGTTGCTAAAATGACCTGCTGCAGCTCTAATTTTATCTACCACCATCACTCACCAGTTGAAACTCAC
CAGCTCCTCAGATCCTTAATAGTGCCAATGAATTTTCTCAAAGAGCACTATGTAACATTTCTCTTTTTTAACAAA
ACCTCCCCCTTTTCTTTGTTGTGTGGATATACCGAAGACCATCTGATCTACATGTATGCCCTAATTGCAATTCTT
TCTTCCCAAATAAATCACTTAATTTAGAGATTCATCTCTGTATTTTTATTTTGACTGACAGCTTATAACAAGTAG
CTAGCATTTACCAAGTTTCTACACTGAGTTGTACTTCACTTATACGTGGAATTAAAAAACAACTGAATTTATAGA
AACAGAGTAGACCCTTGGTTGGGGGGCTTGGGGGGAAAGAAAATTGTAGGGTAGGGTACAAAGTTGCAGTTACGT
CTAATACATCTAGAGATTTAATGTACAACATGAGGACTAGCGTTAATAATTGTGTTAGTCCATTCTTACACTGCT
ATAAAGAAATAACTGAAACTGGGTAATTTATAAAGAAAAGTTTAATGGCTCACAGTTCTGCAGGCTGTACAAGAA
GCATGGCTGGATCAGCTTCTGGGCAGGCCATAGGGAACTTAAAATCATGATGGAAGGCATAGGGAGACCCCAGAC
TTCACATGGCAGGAACTGGGGGAAGAGAGAAATGGGAGGTGCTACATACGTTTAAACAACTAGATCTTGTCAGAA
CTCACTATATAGTACCAAGAGGGGACTGTACAAAACCATTAGAAGCCACCCCATAATCCACTCACCTCCCACCAG
GCCCAACCTCCAACACTGGGGATTACAGTTGAACATGAGATTTGGGTGGGGACAGAGATCCAAACCATGTTATTC
CAACTC
>SEQ ID NO: 19 nucleotides 5127-5607 of NG_031977.2
GGGTCTAGCAAGAGCAGGTGTGGGTTTAGGAGGTGTGTGTTTTTGTTTTTCCCACCCTCTCTCCCCACTACTTGC
TCTCACAGTACTCGCTGAGGGTGAACAAGAAAAGACCTGATAAAGATTAACCAGAAGAAAACAAGGAGGGAAACA
ACCGCAGCCTGTAGCAAGCTCTGGAACTCAGGAGTCGCGCGCTAGGGGCCGGGGCCGGGGCCGGGGCGTGGTCGG
GGCGGGCCCGGGGGCGGGCCCGGGGCGGGGCTGCGGTTGCGGTGCCTGCGCCCGCGGCGGCGGAGGCGCAGGCGG
TGGCGAGTGGGTGAGTGAGGAGGCGGCATCCTGGCGGGTGGCTGTTTGGGGTTCGGCTGCCGGGAAGAGGCGCGG
GTAGAAGCGGGGGCTCTCCTCAGAGCTCGACGCATTTTTACTTTCCCTCTCATTTCTCTGACCGAAGCTGGGTGT
CGGGCTTTCGCCTCTAGCGACTGGTGGAATT
>SEQ ID NO: 20 Reverse complement of SEQ ID NO: 19 (hg38_dna
range = chr9: 27573260-27573740)
AATTCCACCAGTCGCTAGAGGCGAAAGCCCGACACCCAGCTTCGGTCAGAGAAATGAGAGGGAAAGTAAAAATGC
GTCGAGCTCTGAGGAGAGCCCCCGCTTCTACCCGCGCCTCTTCCCGGCAGCCGAACCCCAAACAGCCACCCGCCA
GGATGCCGCCTCCTCACTCACCCACTCGCCACCGCCTGCGCCTCCGCCGCCGCGGGCGCAGGCACCGCAACCGCA
GCCCCGCCCCGGGCCCGCCCCCGGGCCCGCCCCGACCACGCCCCGGCCCCGGCCCCGGCCCCTAGCGCGCGACTC
CTGAGTTCCAGAGCTTGCTACAGGCTGCGGTTGTTTCCCTCCTTGTTTTCTTCTGGTTAATCTTTATCAGGTCTT
TTCTTGTTCACCCTCAGCGAGTACTGTGAGAGCAAGTAGTGGGGAGAGAGGGTGGGAAAAACAAAAACACACACC
TCCTAAACCCACACCTGCTCTTGCTAGACCC
SEQ ID NO. 21
CAGCTTCGGTCAGAGAAATGAGAGGGAAAGTAAAAATGCGTCGAGCTCT
SEQ ID NO. 22
CGCGACTCCTGAGTTCCAGAGCTTGCTACAGGC
SEQ ID NO. 23
AGGCTGCGGTTGTTTCCCTCCTTGTTT
SEQ ID NO. 24
GGTTGTTTCCCTCCTTGTTTTCTTCTGGTTAATCTTTATCAGGTCTTTTCTTGTTCACCCTCAGCGAGTACTGTG
AGAG
SEQ ID NO. 25
CTCAGCGAGTACTGTGAGAGCAAG
SEQ ID NO. 26
ACCTCCTAAACCCACACCTGCTCTTGCTAGACC
SEQ ID NO.27
CAGCTTCGGTCAGAGAAATGAGAGGGAAAGTAAAAATGCGTCGAGCTC
SEQ ID NO. 28
CGCGACTCCTGAGTTCCAGAGCTT
SEQ ID NO. 29
GACTCCTGAGTTCCAGAGCTTGCTACAGGC
SEQ ID NO. 30
GGCTGCGGTTGTTTCCCTCCTTGTTT
SEQ ID NO. 31
GGTTGTTTCCCTCCTTGTTTTCTTCTGGTTAATCTTTATCAGGTCTTTTCTTGTTCACCCTCAGCGAGTACTGTG
AGAG
SEQ ID NO. 32
CAGCTTCGGTCAGAGAAATGAGAGGGAAAGTAAAAATGCGTCGAGC
SEQ ID NO. 33
ACTCCTGAGTTCCAGAGCTTGCTACAG
SEQ ID NO. 34
CTGCGGTTGTTTCCCTCCTTGTTT
SEQ ID NO. 35
GGTTGTTTCCCTCCTTGTTTTCTTCTGGTTAATCTTT
SEQ ID NO. 36
TTTCTTCTGGTTAATCTTTATCAGGTCTTTTCTTGTTCACCCTCAGCGAG
SEQ ID NO. 37
GAGAGGGAAAGTAAAAATGCGTCG
SEQ ID NO. 38
GGTTGTTTCCCTCCTTGTTTTCTTCTGGTTAATCTTT
SEQ ID NO. 39
TTTCTTCTGGTTAATCTTTATCAGGTCTTTTCTTGTTCACCCTCAGCG
SEQ ID NO. 40
GTTTCCCTCCTTGTTTTCTTCTGGTTAATCTTT
SEQ ID NO. 41
TTTCTTCTGGTTAATCTTTATCAGGTCTTTTCTTGTTCACCCTCAGC
SEQ ID NO. 42
GTTTCCCTCCTTGTTTTCTTCTGGTT
SEQ ID NO. 43
CTCCTTGTTTTCTTCTGGTTAATCTTT
SEQ ID NO. 44
TTTCTTCTGGTTAATCTTTATCAGGTCTTTTCTTGTTCACCC
SEQ ID NO. 45
TCCTTGTTTTCTTCTGGTTAATCTTT
SEQ ID NO. 46
TTTCTTCTGGTTAATCTTTATCAGGTCTTTTCTT
SEQ ID NO. 47
ATCTTTATCAGGTCTTTTCTTGTTCACCC
SEQ ID NO. 51
TGCGTCAAACAGCGACAAGTTCCGC
SEQ ID NO. 52
GCCCACGTAAAAGATGACGCTTGGTGTGTC
SEQ ID NO. 53
CTTGCTCTCACAGTACTCGCTGAGGG
SEQ ID NO. 54
TCGCTGAGGGTGAACAAGAAAAGACCTGATAAAGATTAACCAGAAGAAAACAAGGAGG
SEQ ID NO. 55
TTACTTTCCCTCTCATTTCTCTGACCG
SEQ ID NO. 56
TCCCTCTCATTTCTCTGACCGAAGCT
SEQ ID NO. 57
GGAGACGCCTGCACAATTTCAGCCCAAGCTTCTAGAGAGT
SEQ ID NO. 58
CAGCCCAAGCTTCTAGAGAGTGGTGATGACTTGC
SEQ ID NO. 59
TAGAGAGTGGTGATGACTTGCATATGAGG
SEQ ID NO. 60
CTGTGGGACATGACCTGGTTGCTT
SEQ ID NO. 61
GGACATGACCTGGTTGCTTCACAGCTCC
SEQ ID NO. 62
CCTGGTTGCTTCACAGCTCCGAGATGACACAGACTTGCTTAAAGGAAGTGA
SEQ ID NO. 63
TGCGTCAAACAGCGACAAGTTCCGC
SEQ ID NO. 64
CCCACGTAAAAGATGACGCTTGGTGT
SEQ ID NO. 65
GTAAAAGATGACGCTTGGTGTGTC
SEQ ID NO. 66
CTTGCTCTCACAGTACTCGCTGAGGG
SEQ ID NO. 67
TCGCTGAGGGTGAACAAGAAAAGACCTGATAAAGATTAACCAGAAGAAAACAAGGAGG
SEQ ID NO. 68
TTACTTTCCCTCTCATTTCTCTGACCG
SEQ ID NO. 69
TCCCTCTCATTTCTCTGACCGAAGC
SEQ ID NO. 70
CGCCTGCACAATTTCAGCCCAAGCTTCTAGAGAGT
SEQ ID NO. 71
CCAAGCTTCTAGAGAGTGGTGATGA
SEQ ID NO. 72
TAGAGAGTGGTGATGACTTGCATATG
SEQ ID NO. 73
GGACATGACCTGGTTGCTTCACAGCTCC
SEQ ID NO. 74
CTCCGAGATGACACAGACTTGCTT
SEQ ID NO. 75
GAGATGACACAGACTTGCTTAAAGGAA
SEQ ID NO. 76
GCGTCAAACAGCGACAAGTTCCGC
SEQ ID NO. 77
GTAAAAGATGACGCTTGGTGTGTC
SEQ ID NO. 78
TGAACAAGAAAAGACCTGATAAAGATTAACCAGAAGAAAACAAGGAGG
SEQ ID NO. 79
TTACTTTCCCTCTCATTTCTCTGAC
SEQ ID NO. 80
CCAAGCTTCTAGAGAGTGGTGATG
SEQ ID NO. 81
ATGACCTGGTTGCTTCACAGCTCC
SEQ ID NO. 82
CTCCGAGATGACACAGACTTGCTT
SEQ ID NO. 83
GAGATGACACAGACTTGCTTAAAGGA
SEQ ID NO. 84
GCGTCAAACAGCGACAAGTTCCGC
SEQ ID NO. 85
TGAACAAGAAAAGACCTGATAAAGATTAACCAGAAGAAAACAAGGAGG
SEQ ID NO. 86
TTACTTTCCCTCTCATTTCTCTGA
SEQ ID NO. 87
ATGACCTGGTTGCTTCACAGCTCC
SEQ ID NO. 88
CTCCGAGATGACACAGACTTGCTT
SEQ ID NO. 89
GAGATGACACAGACTTGCTTAAAGGA
SEQ ID NO. 90
AGAAAAGACCTGATAAAGATTAAC
SEQ ID NO. 91
AAGACCTGATAAAGATTAACCAGA
SEQ ID NO. 92
TTACTTTCCCTCTCATTTCTCTGA
SEQ ID NO. 93
CTCCGAGATGACACAGACTTGCTT
SEQ ID NO: 94
>hg38_dna
gtttaaacTCCCCCAGGCGAGGCCTCTCAGTACCCGAGGCTCCCTTTTCTCGAGCCCGCAGCGGCAGCGCTCCCA
GCGGGTCCCCGGGAAGGAGACAGCTCGGGTACTGAGGGCGGGAAAGCAAGGAAGAGGCCAGATCCCCATCCCTTG
TCCCTGCGCCGCCGCCGCCGCCGCCGCCGCCGGGAAGCCCGGGGCCCGGATGCAGGCAATTCCACCAGTCGCTAG
AGGCGAAAGCCCGACACCCAGCTTCGGTCAGAGAAATGAGAGGGAAAGTAAAAATGCGTCGAGCTCTGAGGAGAG
CCCCCGCTTCTACCCGCGCCTCTTCCCGGCAGCCGAACCCCAAACAGCCACCCGCCAGGATGCCGCCTCCTCACT
CACCCACTCGCCACCGCCTGCGCCTCCGCCGCCGCGGGCGCAGGCACCGCAACCGCAGCCCCGCCCCGGGCCCGC
CCCCGGGCCCGCCCCGACCACGCCCCGGCCCCGGCCCCGGCCCCTAGCGCGCGACTCCTGAGTTCCAGAGCTTGC
TACAGGCTGCGGTTGTTTCCCTCCTTGTTTTCTTCTGGTTAATCTTTATCAGGTCTTTTCTTGTTCACCCTCAGC
GAGTACTGTGAGAGCAAGTAGTGGGGAGAGAGGGTGGGAAAAACAAAAACACACACCTCCTAAACCCACACCTGC
TCTTGCTAGACCCGCGGCCGC
SEQ ID NO: 100
GGGGCC

The application's sequence listing, which the Patent Office published only in electronic form, follows.

SEQUENCE LISTING (1422 sequences)

SEQ ID NO: 1 - DNA, 3356 bp, Homo sapiens
  source 1..3356: mol_type = other DNA
acgtaacctacggtgtcccgctaggaaagagaggtgcgtcaaacagcgacaagttccgcccacgtaaaagatgacgcttggtgtgtcagccgtccctgctgcccggttgcttctcttttgggggcggggtctagcaagagcaggtgtgggtttaggagatatctccggagcatttggataatgtgacagttggaatgcagtgatgtcgactctttgcccaccgccatctccagctgttgccaagacagagattgctttaagtggcaaatcacctttattagcagctacttttgcttactgggacaatattcttggtcctagagtaaggcacatttgggctccaaagacagaacaggtacttctcagtgatggagaaataacttttcttgccaaccacactctaaatggagaaatccttcgaaatgcagagagtggtgctatagatgtaaagttttttgtcttgtctgaaaagggagtgattattgtttcattaatctttgatggaaactggaatggggatcgcagcacatatggactatcaattatacttccacagacagaacttagtttctacctcccacttcatagagtgtgtgttgatagattaacacatataatccggaaaggaagaatatggatgcataaggaaagacaagaaaatgtccagaagattatcttagaaggcacagagagaatggaagatcagggtcagagtattattccaatgcttactggagaagtgattcctgtaatggaactgctttcatctatgaaatcacacagtgttcctgaagaaatagatatagctgatacagtactcaatgatgatgatattggtgacagctgtcatgaaggctttcttctcaatgccatcagctcacacttgcaaacctgtggctgttccgttgtagtaggtagcagtgcagagaaagtaaataagatagtcagaacattatgcctttttctgactccagcagagagaaaatgctccaggttatgtgaagcagaatcatcatttaaatatgagtcagggctctttgtacaaggcctgctaaaggattcaactggaagctttgtgctgcctttccggcaagtcatgtatgctccatatcccaccacacacatagatgtggatgtcaatactgtgaagcagatgccaccctgtcatgaacatatttataatcagcgtagatacatgagatccgagctgacagccttctggagagccacttcagaagaagacatggctcaggatacgatcatctacactgacgaaagctttactcctgatttgaatatttttcaagatgtcttacacagagacactctagtgaaagccttcctggatcaggtctttcagctgaaacctggcttatctctcagaagtactttccttgcacagtttctacttgtccttcacagaaaagccttgacactaataaaatatatagaagacgatacgcagaagggaaaaaagccctttaaatctcttcggaacctgaagatagaccttgatttaacagcagagggcgatcttaacataataatggctctggctgagaaaattaaaccaggcctacactcttttatctttggaagacctttctacactagtgtgcaagaacgagatgttctaatgactttttaaatgtgtaacttaataagcctattccatcacaatcatgatcgctggtaaagtagctcagtggtgtggggaaacgttcccctggatcatactccagaattctgctctcagcaattgcagttaagtaagttacactacagttctcacaagagcctgtgaggggatgtcaggtgcatcattacattgggtgtctcttttcctagatttatgcttttgggatacagacctatgtttacaatataataaatattattgctatcttttaaagatataataataggatgtaaacttgaccacaactactgtttttttgaaatacatgattcatggtttacatgtgtcaaggtgaaatctgagttggcttttacagatagttgactttctatcttttggcattctttggtgtgtagaattactgtaatacttctgcaatcaactgaaaactagagcctttaaatgatttcaattccacagaaagaaagtgagcttgaacataggatgagctttagaaagaaaattgatcaagcagatgtttaattggaattgattattagatcctactttgtggatttagtccctgggattcagtctgtagaaatgtctaatagttctctatagtccttgttcctggtgaaccacagttagggtgttttgtttattttattgttcttgctattgttgatattctatgtagttgagctctgtaaaaggaaattgtattttatgttttagtaattgttgccaactttttaaattaattttcattatttttgagccaaattgaaatgtgcacctcctgtgccttttttctccttagaaaatctaattacttggaacaagttcagatttcactggtcagtcattttcatcttgttttcttcttgctaagtcttaccatgtacctgctttggcaatcattgcaactctgagattataaaatgccttagagaatatactaactaataagatctttttttcagaaacagaaaatagttccttgagtacttccttcttgcatttctgcctatgtttttgaagttgttgctgtttgcctgcaataggctataaggaatagcaggagaaattttactgaagtgctgttttcctaggtgctactttggcagagctaagttatcttttgttttcttaatgcgtttggaccattttgctggctataaaataactgattaatataattctaacacaatgttgacattgtagttacacaaacacaaataaatattttatttaaaattctggaagtaatataaaagggaaaatatatttataagaaagggataaaggtaatagagcccttctgccccccacccaccaaatttacacaacaaaatgacatgttcgaatgtgaaaggtcataatagctttcccatcatgaatcagaaagatgtggacagcttgatgttttagacaaccactgaactagatgactgttgtactgtagctcagtcatttaaaaaatatataaatactaccttgtagtgtcccatactgtgttttttacatggtagattcttatttaagtgctaactggttattttctttggctggtttattgtactgttatacagaatgtaagttgtacagtgaaataagttattaaagcatgtgtaaacattgttatatatcttttctcctaaatggagaattttgaataaaatatatttgaaattttaaaaaaaaaaaaaaaaaa

SEQ ID NO: 2 - DNA, 3339 bp, Macaca fascicularis
  source 1..3339: mol_type = other DNA
acgtaacctacggtgtcccgctaggaaagagaggcgcgtcaaacagcgacaagttccgcccacgtaaaagatgacgcttggtgcgtcagccgtccctgctgcccggttccttctctctgggggcggggcctggctagagcaggtgtgggtttaggagatatctcaggagcatttggataatgtgacagttggaatgcagtgatgtcgactctttgcccaccgccatctccagctgttgccaagacagagattgctttaagtggtgaatcacctttattagcagctacttttgcttactgggacaatattcttggtcctagagtaaggcacatttgggctccaaagacagaacaggtacttctcagtgacggagaaataacttttcttgccaaccacactctaaatggagaaatccttcgaaatgcagagagtggtgctatagatgtaaagttttttgtcttgtctgaaaagggagtgattattgtttcattaatctttgatggaaactggaatggggatcgcagcacatacggactatcaattatacttccacagacagaacttagtttctacctcccacttcatagagtgtgtgttgatagattaacacatataatccggaaaggaagaatatggatgcataaggaaagacaagaaaatgtccagaagattatcttagaaggcacagagagaatggaagatcagggtcagagtattattccaatgcttactggagaagtgattcctgtaatggaactgctttcatctatgaaatcacacagtgttcctgaagaaatagatatagctgatacagtactcaatgatgatgatattggtgacagttgtcatgaaggctttcttctcaatgccatcagctcacacttgcaaacctgtggctgttccgttgtagtaggtagcagtgcagagaaagtaaataagatagtcagaacattatgcctttttctgactgcagcagagagaaaatgctccaggttatgtgaagcagaatcatcatttaaatatgagtcagggctctttgtacagggcctgctaaaggattcaactggaagctttgtgctgcctttccggcaagtcatgtatgctccatatcccaccacacacatagatgtggatgtcaatactgtgaagcagatgccaccctgtcatgaacatatttataatcagcgtagatacatgagatccgagctgacagccttctggagagccacttcagaagaagacatggctcaggatacgatcatctacactgacgaaagctttactcctgatttgaatatttttcaagatgtcttacacagagacactctagtgaaagccttcctggatcaggtctttcagctgaaacctggcttatctctcaggagtactttccttgcacagtttttacttgtccttcacagaaaagccttgacactaataaaatatatagaagatgatacgcagaagggaaaaaagccctttaaatctcttcggaacctgaagatagaccttgatttaacagcagagggcgatcttaacataataatggctctggctgagaaaattaaaccaggcctacactcttttatctttggaagacctttctacactagtgtacaagaacgagatgttctaatgactttttaaatgtgtaacttaataagcctattccatcacaatcgtgatcgctgctaaagtagctcggtggtgtggggaaacattcccctggatcatactccagagctctgctcggcagttgcagttaagttagttacactacagttctcacaagagtctgtgaggggatgtcaggtgcatcattacattggatgtctcttttcctagatttatgcttttgggatacagacctatgtttacaatataataggtattattgctgtcttttaaatatataataataggatataaacttgaccacaactgctgtttttttgaaatatatgattcatggtttacatgtattaaggtgaaatccgagttcgcttttacagatattagttgactttctatcttttggcattctttggtgtgtggaattactgtaatacttctgcaatcaactgaaaattagagcctttaaatgatttcagttccacagaaagaaagtgagcttcaacataggataagctttagaaagagaattgatcaagcagatgtttaattggaattgattattagatcctgctttgtggatttagccctcgggattcagtctgtagaaatgtctgatagttctctatagtccctgctcatggtgaaccacagttaggatgttttgtttgttttattgttgttgctattgttgatgttctatatagttgagctctgtaaaaggaaattgtattttatgttttagtagttgttgccaactttttaaattaattttcattatttttgagccaaattgaaatgtgcacctcctgtgccttttttttccttggaaaatcgaattacttggaagaagttcagatttcactggtcagtcgttttcatcttgttttcttcttgcagagtcttaccatgtacctgctttggcaatcattgtaactctgagattataaaatgcattagagaatatattaactaataagatcttttttttcaggaacagaaaatagttccttgagtacttccttcttacatttctgcccatgtttttgaagttgttgccatttgcctgcaataggctataaggaatagcaggagaaattttactgaagtgctatttttctaggtgctactttggcagagctaagtggtctgtttcttttgtttccttaatgcgtttggaccattttgctggctgtaaaataactgattaatataattctaacacaatattgacattgtagtgtacacaaacacaaatattttatttaaaactggaagtaacataaaagggaaaatatatttataagaaaggaataaaggtaatagagctcttctgtcccccagccaccaaatttacacaacaaaatgatatgttctaatgtgaaaggtcataatagctttcccatcattaatcagaaagatgtggcagcttgatttttcagacaacccctgaactagatgactgttgtactgtagctcagtcatttaaaaaatatataaatactatctcgtagtgtcccatactatgttttttacatgatagattcttatttaagtgctacctggttattttctttggctggtttattgtactgttatatagaatgtaagttgtacagtgaaataagttattaaagcatgtgtaaacattgttatatatcttttctcctagatggagaattttgaataaaatatatttgaaatttt

SEQ ID NO: 3 - DNA, 3151 bp, Mus musculus
  source 1..3151: mol_type = other DNA
gcggttgcggtccctgcgccggcggtgaaggcgcagcagcggcgagtggctattgcaagcgttcggataatgtgagacctggaatgcagtgagacctgggatgcagggatgtcgactatctgccccccaccatctcctgctgttgccaagacagagattgctttaagtggtgaatcacccttgttggcggctacctttgcttactgggataatattcttggtcctagagtaaggcatatttgggctccaaagacagaccaagtgcttctcagtgatggagaaataacttttcttgccaaccacactctaaatggagaaattcttcgaaatgcagagagtggggctatagatgtaaaattttttgtcttatctgaaaaaggggtaattattgtttcattaatcttcgacggaaactggaatggagatcggagcacttatggactatcaattatactgccgcagacagagctgagcttctacctcccacttcacagagtgtgtgttgacaggctaacacacattattcgaaaaggaagaatatggatgcataaggaaagacaagaaaatgtccagaaaattgtcttggaaggcacagagaggatggaagatcagggtcagagtatcattcccatgcttactggggaagtcattcctgtaatggagctgcttgcatctatgaaatcccacagtgttcctgaagacattgatatagctgatacagtgctcaatgatgatgacattggtgacagctgtcacgaaggctttcttctcaatgccatcagctcacacctgcagacctgtggctgttccgttgtagttggcagcagtgcagagaaagtaaataagatagtaagaacgctgtgcctttttctgacaccagcagagaggaaatgctccaggctgtgtgaagcagaatcgtcctttaagtacgaatcgggactctttgtgcaaggcttgctaaaggatgcaacaggcagttttgtcctacccttccggcaagttatgtatgccccgtaccccaccacgcacattgatgtggatgtcaacactgtcaagcagatgccaccgtgtcatgaacatatttataatcaacgcagatacatgaggtcagagctgacagccttctggagggcaacttcagaagaggacatggcgcaggacaccatcatctacacagatgagagcttcactcctgatttgaatattttccaagatgtcttacacagagacactctagtgaaagccttcctggatcaggtcttccatttgaagcctggcctgtctctcaggagtactttccttgcacagttcctcctcattcttcacagaaaagccttgacactaatcaagtacatcgaggatgatacgcagaaggggaaaaagccctttaagtctcttcggaacctgaagatagatcttgatttaacagcagagggcgatcttaacataataatggctctagctgagaaaattaagccaggcctacactctttcatctttgggagacctttctacactagtgtacaagaacgtgatgttctaatgaccttttgaccgtgtggtttgctgtgtctgtctcttcacagtcacacctgctgttacagtgtctcagcagtgtgtgggcacatccttcctcccgagtcctgctgcaggacagggtacactacacttgtcagtagaagtctgtacctgatgtcaggtgcatcgttacagtgaatgactcttcctagaatagatgtactcttttagggccttatgtttacaattatcctaagtactattgctgtcttttaaagatatgaatgatggaatatacacttgaccataactgctgattggttttttgttttgttttgtttgttttcttggaaacttatgattcctggtttacatgtaccacactgaaaccctcgttagctttacagataaagtgtgagttgacttcctgcccctctgtgttctgtggtatgtccgattacttctgccacagctaaacattagagcatttaaagtttgcagttcctcagaaaggaacttagtctgactacagattagttcttgagagaagacactgatagggcagagctgtaggtgaaatcagttgttagcccttcctttatagacgtagtccttcagattcggtctgtacagaaatgccgaggggtcatgcatgggccctgagtatcgtgacctgtgacaagttttttgttggtttattgtagttctgtcaaagaaagtggcatttgtttttataattgttgccaacttttaaggttaattttcattatttttgagccgaattaaaatgcgcacctcctgtgcctttcccaatcttggaaaatataatttcttggcagagggtcagatttcagggcccagtcactttcatctgaccaccctttgcacggctgccgtgtgcctggcttagattagaagtccttgttaagtatgtcagagtacattcgctgataagatctttgaagagcagggaagcgtcttgcctctttcctttggtttctgcctgtactctggtgtttcccgtgtcacctgcatcataggaacagcagagaaatctgacccagtgctatttttctaggtgctactatggcaaactcaagtggtctgtttctgttcctgtaacgttcgactatctcgctagctgtgaagtactgattagtggagttctgtgcaacagcagtgtaggagtatacacaaacacaaatatgtgtttctatttaaaactgtggacttagcataaaaagggagaatatatttattttttacaaaagggataaaaatgggccccgttcctcacccaccagatttagcgagaaaaagctttctattctgaaaggtcacggtggctttggcattacaaatcagaacaacacacactgaccatgatggcttgtgaactaactgcaaggcactccgtcatggtaagcgagtaggtcccacctcctagtgtgccgctcattgctttacacagtagaatcttatttgagtgctaattgttgtctttgctgctttactgtgttgttatagaaaatgtaagctgtacagtgaataagttattgaagcatgtgtaaacactgttatatatcttttctcctagatggggaattttgaataaaatacctttgaaattctg

SEQ ID NO: 4 - DNA, 3435 bp, Rattus norvegicus
  source 1..3435: mol_type = other DNA
cgtttgtagtgtcagccatcccaattgcctgttccttctctgtgggagtggtgtctagacagtccaggcagggtatgctaggcaggtgcgttttggttgcctcagatcgcaacttgactccataacggtgaccaaagacaaaagaaggaaaccagattaaaaagaaccggacacagacccctgcagaatctggagcggccgtggttgggggcggggctacgacggggcggactcgggggcgtgggagggcggggccggggcggggcccggagccggctgcggttgcggtccctgcgccggcggtgaaggcgcagcggcggcgagtggctattgcaagcgtttggataatgtgagacctgggatgcagggatgtcgactatctgccccccaccatctcctgctgttgccaagacagagattgctttaagtggtgaatcacccttgttggcggctacctttgcttactgggataatattcttggtcctagagtaaggcacatttgggctccaaagacagaccaagtactcctcagtgatggagaaatcacttttcttgccaaccacactctgaatggagaaattcttcggaatgcggagagtggggcaatagatgtaaagttttttgtcttatctgaaaagggcgtcattattgtttcattaatcttcgacgggaactggaacggagatcggagcacttacggactatcaattatactgccgcagacggagctgagtttctacctcccactgcacagagtgtgtgttgacaggctaacgcacatcattcgaaaaggaaggatatggatgcacaaggaaagacaagaaaatgtccagaaaattgtcttggaaggcaccgagaggatggaagatcagggtcagagtatcatccctatgcttactggggaggtcatccctgtgatggagctgcttgcgtctatgagatcacacagtgttcctgaagacctcgatatagctgatacagtactcaatgatgatgacattggtgacagctgtcatgaaggctttcttctcaatgccatcagctcacatctgcagacctgcggctgttctgtggtggtaggcagcagtgcagagaaagtaaataagatagtaagaacactgtgcctttttctgacaccagcagagaggaagtgctccaggctgtgtgaagccgaatcgtcctttaaatacgaatctggactctttgtacaaggcttgctaaaggatgcgactggcagttttgtactacctttccggcaagttatgtatgccccttatcccaccacacacatcgatgtggatgtcaacactgtcaagcagatgccaccgtgtcatgaacatatttataatcaacgcagatacatgaggtcagagctgacagccttctggagggcaacttcagaagaggacatggctcaggacaccatcatctacacagatgagagcttcactcctgatttgaatattttccaagatgtcttacacagagacactctagtgaaagcctttctggatcaggtcttccatttgaagcctggcctgtctctcaggagtactttccttgcacagttcctcctcattcttcacagaaaagccttgacactaatcaagtacatagaggatgacacgcagaaggggaaaaagccctttaagtctcttcggaacctgaagatagatcttgatttaacagcagagggcgaccttaacataataatggctctagctgagaaaattaagccaggcctacactctttcatcttcgggagacctttctacactagtgtccaagaacgtgatgttctaatgactttttaaacatgtggtttgctccgtgtgtctcatgacagtcacacttgctgttacagtgtctcagcgctttggacacatccttcctccagggtcctgccgcaggacacgttacactacacttgtcagtagaggtctgtaccagatgtcaggtacatcgttgtagtgaatgtctcttttcctagactagatgtaccctcgtagggacttatgtttacaaccctcctaagtactagtgctgtcttgtaaggatacgaatgaagggatgtaaacttcaccacaactgctggttggttttgttgtttttgttttttgaaacttataattcatggtttacatgcatcacactgaaaccctagttagctttttacaggtaagctgtgagttgactgcctgtccctgtgttctctggcctgtacgatctgtggcgtgtaggatcacttttgcaacaactaaaaactaaagcactttgtttgcagttctacagaaagcaacttagtctgtctgcagattcgtttttgaaagaagacatgagaaagcggagttttaggtgaagtcagttgttggatcttcctttatagacttagtcctttagatgtggtctgtatagacatgcccaaccatcatgcatgggcactgaatatcgtgaactgtggtatgctttttgttggtttattgtacttctgtcaaagaaagtggcattggtttttataattgttgccaagttttaaggttaattttcattatttttgagccaaattaaaatgtgcacctcctgtgcctttcccaatcttggaaaatataatttcttggcagaaggtcagatttcagggcccagtcactttcgtctgacttccctttgcacagtccgccatgggcctggcttagaagttcttgtaaactatgccagagagtacattcgctgataaaatcttctttgcagagcaggagagcttcttgcctctttcctttcatttctgcctggactttggtgttctccacgttccctgcatcctaaggacagcaggagaactctgaccccagtgctatttctctaggtgctattgtggcaaactcaagcggtccgtctctgtccctgtaacgttcgtaccttgctggctgtgaagtactgactggtaaagctccgtgctacagcagtgtagggtatacacaaacacaagtaagtgttttatttaaaactgtggacttagcataaaaagggagactatatttattttttacaaaagggataaaaatggaaccctttcctcacccaccagatttagtcagaaaaaaacattctattctgaaaggtcacagtggttttgacatgacacatcagaacaacgcacactgtccatgatggcttatgaactccaagtcactccatcatggtaaatgggtagatccctccttctagtgtgccacaccattgcttcccacagtagaatcttatttaagtgctaagtgttgtctctgctggtttactctgttgttttagagaatgtaagttgtatagtgaataagttattgaagcatgtgtaaacactgttatacatcttttctcctagatggggaatttggaataaaatacctttaaaattcaaaaaaaaaaaaaaaaaaaaaaaa

SEQ ID NO: 5 - DNA, 3356 bp, Homo sapiens
  source 1..3356: mol_type = other DNA
ttttttttttttttttttaaaatttcaaatatattttattcaaaattctccatttaggagaaaagatatataacaatgtttacacatgctttaataacttatttcactgtacaacttacattctgtataacagtacaataaaccagccaaagaaaataaccagttagcacttaaataagaatctaccatgtaaaaaacacagtatgggacactacaaggtagtatttatatattttttaaatgactgagctacagtacaacagtcatctagttcagtggttgtctaaaacatcaagctgtccacatctttctgattcatgatgggaaagctattatgacctttcacattcgaacatgtcattttgttgtgtaaatttggtgggtggggggcagaagggctctattacctttatccctttcttataaatatattttcccttttatattacttccagaattttaaataaaatatttatttgtgtttgtgtaactacaatgtcaacattgtgttagaattatattaatcagttattttatagccagcaaaatggtccaaacgcattaagaaaacaaaagataacttagctctgccaaagtagcacctaggaaaacagcacttcagtaaaatttctcctgctattccttatagcctattgcaggcaaacagcaacaacttcaaaaacataggcagaaatgcaagaaggaagtactcaaggaactattttctgtttctgaaaaaaagatcttattagttagtatattctctaaggcattttataatctcagagttgcaatgattgccaaagcaggtacatggtaagacttagcaagaagaaaacaagatgaaaatgactgaccagtgaaatctgaacttgttccaagtaattagattttctaaggagaaaaaaggcacaggaggtgcacatttcaatttggctcaaaaataatgaaaattaatttaaaaagttggcaacaattactaaaacataaaatacaatttccttttacagagctcaactacatagaatatcaacaatagcaagaacaataaaataaacaaaacaccctaactgtggttcaccaggaacaaggactatagagaactattagacatttctacagactgaatcccagggactaaatccacaaagtaggatctaataatcaattccaattaaacatctgcttgatcaattttctttctaaagctcatcctatgttcaagctcactttctttctgtggaattgaaatcatttaaaggctctagttttcagttgattgcagaagtattacagtaattctacacaccaaagaatgccaaaagatagaaagtcaactatctgtaaaagccaactcagatttcaccttgacacatgtaaaccatgaatcatgtatttcaaaaaaacagtagttgtggtcaagtttacatcctattattatatctttaaaagatagcaataatatttattatattgtaaacataggtctgtatcccaaaagcataaatctaggaaaagagacacccaatgtaatgatgcacctgacatcccctcacaggctcttgtgagaactgtagtgtaacttacttaactgcaattgctgagagcagaattctggagtatgatccaggggaacgtttccccacaccactgagctactttaccagcgatcatgattgtgatggaataggcttattaagttacacatttaaaaagtcattagaacatctcgttcttgcacactagtgtagaaaggtcttccaaagataaaagagtgtaggcctggtttaattttctcagccagagccattattatgttaagatcgccctctgctgttaaatcaaggtctatcttcaggttccgaagagatttaaagggcttttttcccttctgcgtatcgtcttctatatattttattagtgtcaaggcttttctgtgaaggacaagtagaaactgtgcaaggaaagtacttctgagagataagccaggtttcagctgaaagacctgatccaggaaggctttcactagagtgtctctgtgtaagacatcttgaaaaatattcaaatcaggagtaaagctttcgtcagtgtagatgatcgtatcctgagccatgtcttcttctgaagtggctctccagaaggctgtcagctcggatctcatgtatctacgctgattataaatatgttcatgacagggtggcatctgcttcacagtattgacatccacatctatgtgtgtggtgggatatggagcatacatgacttgccggaaaggcagcacaaagcttccagttgaatcctttagcaggccttgtacaaagagccctgactcatatttaaatgatgattctgcttcacataacctggagcattttctctctgctggagtcagaaaaaggcataatgttctgactatcttatttactttctctgcactgctacctactacaacggaacagccacaggtttgcaagtgtgagctgatggcattgagaagaaagccttcatgacagctgtcaccaatatcatcatcattgagtactgtatcagctatatctatttcttcaggaacactgtgtgatttcatagatgaaagcagttccattacaggaatcacttctccagtaagcattggaataatactctgaccctgatcttccattctctctgtgccttctaagataatcttctggacattttcttgtctttccttatgcatccatattcttcctttccggattatatgtgttaatctatcaacacacactctatgaagtgggaggtagaaactaagttctgtctgtggaagtataattgatagtccatatgtgctgcgatccccattccagtttccatcaaagattaatgaaacaataatcactcccttttcagacaagacaaaaaactttacatctatagcaccactctctgcatttcgaaggatttctccatttagagtgtggttggcaagaaaagttatttctccatcactgagaagtacctgttctgtctttggagcccaaatgtgccttactctaggaccaagaatattgtcccagtaagcaaaagtagctgctaataaaggtgatttgccacttaaagcaatctctgtcttggcaacagctggagatggcggtgggcaaagagtcgacatcactgcattccaactgtcacattatccaaatgctccggagatatctcctaaacccacacctgctcttgctagaccccgcccccaaaagagaagcaaccgggcagcagggacggctgacacaccaagcgtcatcttttacgtgggcggaacttgtcgctgtttgacgcacctctctttcctagcgggacaccgtaggttacgt

SEQ ID NO: 6 - DNA, 3339 bp, Macaca fascicularis
  source 1..3339: mol_type = other DNA
aaaatttcaaatatattttattcaaaattctccatctaggagaaaagatatataacaatgtttacacatgctttaataacttatttcactgtacaacttacattctatataacagtacaataaaccagccaaagaaaataaccaggtagcacttaaataagaatctatcatgtaaaaaacatagtatgggacactacgagatagtatttatatattttttaaatgactgagctacagtacaacagtcatctagttcaggggttgtctgaaaaatcaagctgccacatctttctgattaatgatgggaaagctattatgacctttcacattagaacatatcattttgttgtgtaaatttggtggctgggggacagaagagctctattacctttattcctttcttataaatatattttcccttttatgttacttccagttttaaataaaatatttgtgtttgtgtacactacaatgtcaatattgtgttagaattatattaatcagttattttacagccagcaaaatggtccaaacgcattaaggaaacaaaagaaacagaccacttagctctgccaaagtagcacctagaaaaatagcacttcagtaaaatttctcctgctattccttatagcctattgcaggcaaatggcaacaacttcaaaaacatgggcagaaatgtaagaaggaagtactcaaggaactattttctgttcctgaaaaaaaagatcttattagttaatatattctctaatgcattttataatctcagagttacaatgattgccaaagcaggtacatggtaagactctgcaagaagaaaacaagatgaaaacgactgaccagtgaaatctgaacttcttccaagtaattcgattttccaaggaaaaaaaaggcacaggaggtgcacatttcaatttggctcaaaaataatgaaaattaatttaaaaagttggcaacaactactaaaacataaaatacaatttccttttacagagctcaactatatagaacatcaacaatagcaacaacaataaaacaaacaaaacatcctaactgtggttcaccatgagcagggactatagagaactatcagacatttctacagactgaatcccgagggctaaatccacaaagcaggatctaataatcaattccaattaaacatctgcttgatcaattctctttctaaagcttatcctatgttgaagctcactttctttctgtggaactgaaatcatttaaaggctctaattttcagttgattgcagaagtattacagtaattccacacaccaaagaatgccaaaagatagaaagtcaactaatatctgtaaaagcgaactcggatttcaccttaatacatgtaaaccatgaatcatatatttcaaaaaaacagcagttgtggtcaagtttatatcctattattatatatttaaaagacagcaataatacctattatattgtaaacataggtctgtatcccaaaagcataaatctaggaaaagagacatccaatgtaatgatgcacctgacatcccctcacagactcttgtgagaactgtagtgtaactaacttaactgcaactgccgagcagagctctggagtatgatccaggggaatgtttccccacaccaccgagctactttagcagcgatcacgattgtgatggaataggcttattaagttacacatttaaaaagtcattagaacatctcgttcttgtacactagtgtagaaaggtcttccaaagataaaagagtgtaggcctggtttaattttctcagccagagccattattatgttaagatcgccctctgctgttaaatcaaggtctatcttcaggttccgaagagatttaaagggcttttttcccttctgcgtatcatcttctatatattttattagtgtcaaggcttttctgtgaaggacaagtaaaaactgtgcaaggaaagtactcctgagagataagccaggtttcagctgaaagacctgatccaggaaggctttcactagagtgtctctgtgtaagacatcttgaaaaatattcaaatcaggagtaaagctttcgtcagtgtagatgatcgtatcctgagccatgtcttcttctgaagtggctctccagaaggctgtcagctcggatctcatgtatctacgctgattataaatatgttcatgacagggtggcatctgcttcacagtattgacatccacatctatgtgtgtggtgggatatggagcatacatgacttgccggaaaggcagcacaaagcttccagttgaatcctttagcaggccctgtacaaagagccctgactcatatttaaatgatgattctgcttcacataacctggagcattttctctctgctgcagtcagaaaaaggcataatgttctgactatcttatttactttctctgcactgctacctactacaacggaacagccacaggtttgcaagtgtgagctgatggcattgagaagaaagccttcatgacaactgtcaccaatatcatcatcattgagtactgtatcagctatatctatttcttcaggaacactgtgtgatttcatagatgaaagcagttccattacaggaatcacttctccagtaagcattggaataatactctgaccctgatcttccattctctctgtgccttctaagataatcttctggacattttcttgtctttccttatgcatccatattcttcctttccggattatatgtgttaatctatcaacacacactctatgaagtgggaggtagaaactaagttctgtctgtggaagtataattgatagtccgtatgtgctgcgatccccattccagtttccatcaaagattaatgaaacaataatcactcccttttcagacaagacaaaaaactttacatctatagcaccactctctgcatttcgaaggatttctccatttagagtgtggttggcaagaaaagttatttctccgtcactgagaagtacctgttctgtctttggagcccaaatgtgccttactctaggaccaagaatattgtcccagtaagcaaaagtagctgctaataaaggtgattcaccacttaaagcaatctctgtcttggcaacagctggagatggcggtgggcaaagagtcgacatcactgcattccaactgtcacattatccaaatgctcctgagatatctcctaaacccacacctgctctagccaggccccgcccccagagagaaggaaccgggcagcagggacggctgacgcaccaagcgtcatcttttacgtgggcggaacttgtcgctgtttgacgcgcctctctttcctagcgggacaccgtaggttacgt

SEQ ID NO: 7 - DNA, 3151 bp, Mus musculus
  source 1..3151: mol_type = other DNA
cagaatttcaaaggtattttattcaaaattccccatctaggagaaaagatatataacagtgtttacacatgcttcaataacttattcactgtacagcttacattttctataacaacacagtaaagcagcaaagacaacaattagcactcaaataagattctactgtgtaaagcaatgagcggcacactaggaggtgggacctactcgcttaccatgacggagtgccttgcagttagttcacaagccatcatggtcagtgtgtgttgttctgatttgtaatgccaaagccaccgtgacctttcagaatagaaagctttttctcgctaaatctggtgggtgaggaacggggcccatttttatcccttttgtaaaaaataaatatattctccctttttatgctaagtccacagttttaaatagaaacacatatttgtgtttgtgtatactcctacactgctgttgcacagaactccactaatcagtacttcacagctagcgagatagtcgaacgttacaggaacagaaacagaccacttgagtttgccatagtagcacctagaaaaatagcactgggtcagatttctctgctgttcctatgatgcaggtgacacgggaaacaccagagtacaggcagaaaccaaaggaaagaggcaagacgcttccctgctcttcaaagatcttatcagcgaatgtactctgacatacttaacaaggacttctaatctaagccaggcacacggcagccgtgcaaagggtggtcagatgaaagtgactgggccctgaaatctgaccctctgccaagaaattatattttccaagattgggaaaggcacaggaggtgcgcattttaattcggctcaaaaataatgaaaattaaccttaaaagttggcaacaattataaaaacaaatgccactttctttgacagaactacaataaaccaacaaaaaacttgtcacaggtcacgatactcagggcccatgcatgacccctcggcatttctgtacagaccgaatctgaaggactacgtctataaaggaagggctaacaactgatttcacctacagctctgccctatcagtgtcttctctcaagaactaatctgtagtcagactaagttcctttctgaggaactgcaaactttaaatgctctaatgtttagctgtggcagaagtaatcggacataccacagaacacagaggggcaggaagtcaactcacactttatctgtaaagctaacgagggtttcagtgtggtacatgtaaaccaggaatcataagtttccaagaaaacaaacaaaacaaaacaaaaaaccaatcagcagttatggtcaagtgtatattccatcattcatatctttaaaagacagcaatagtacttaggataattgtaaacataaggccctaaaagagtacatctattctaggaagagtcattcactgtaacgatgcacctgacatcaggtacagacttctactgacaagtgtagtgtaccctgtcctgcagcaggactcgggaggaaggatgtgcccacacactgctgagacactgtaacagcaggtgtgactgtgaagagacagacacagcaaaccacacggtcaaaaggtcattagaacatcacgttcttgtacactagtgtagaaaggtctcccaaagatgaaagagtgtaggcctggcttaattttctcagctagagccattattatgttaagatcgccctctgctgttaaatcaagatctatcttcaggttccgaagagacttaaagggctttttccccttctgcgtatcatcctcgatgtacttgattagtgtcaaggcttttctgtgaagaatgaggaggaactgtgcaaggaaagtactcctgagagacaggccaggcttcaaatggaagacctgatccaggaaggctttcactagagtgtctctgtgtaagacatcttggaaaatattcaaatcaggagtgaagctctcatctgtgtagatgatggtgtcctgcgccatgtcctcttctgaagttgccctccagaaggctgtcagctctgacctcatgtatctgcgttgattataaatatgttcatgacacggtggcatctgcttgacagtgttgacatccacatcaatgtgcgtggtggggtacggggcatacataacttgccggaagggtaggacaaaactgcctgttgcatcctttagcaagccttgcacaaagagtcccgattcgtacttaaaggacgattctgcttcacacagcctggagcatttcctctctgctggtgtcagaaaaaggcacagcgttcttactatcttatttactttctctgcactgctgccaactacaacggaacagccacaggtctgcaggtgtgagctgatggcattgagaagaaagccttcgtgacagctgtcaccaatgtcatcatcattgagcactgtatcagctatatcaatgtcttcaggaacactgtgggatttcatagatgcaagcagctccattacaggaatgacttccccagtaagcatgggaatgatactctgaccctgatcttccatcctctctgtgccttccaagacaattttctggacattttcttgtctttccttatgcatccatattcttccttttcgaataatgtgtgttagcctgtcaacacacactctgtgaagtgggaggtagaagctcagctctgtctgcggcagtataattgatagtccataagtgctccgatctccattccagtttccgtcgaagattaatgaaacaataattacccctttttcagataagacaaaaaattttacatctatagccccactctctgcatttcgaagaatttctccatttagagtgtggttggcaagaaaagttatttctccatcactgagaagcacttggtctgtctttggagcccaaatatgccttactctaggaccaagaatattatcccagtaagcaaaggtagccgccaacaagggtgattcaccacttaaagcaatctctgtcttggcaacagcaggagatggtggggggcagatagtcgacatccctgcatcccaggtctcactgcattccaggtctcacattatccgaacgcttgcaatagccactcgccgctgctgcgccttcaccgccggcgcagggaccgcaaccgc

SEQ ID NO: 8 - DNA, 3435 bp, Rattus norvegicus
  source 1..3435: mol_type = other DNA
ttttttttttttttttttttttttgaattttaaaggtattttattccaaattccccatctaggagaaaagatgtataacagtgtttacacatgcttcaataacttattcactatacaacttacattctctaaaacaacagagtaaaccagcagagacaacacttagcacttaaataagattctactgtgggaagcaatggtgtggcacactagaaggagggatctacccatttaccatgatggagtgacttggagttcataagccatcatggacagtgtgcgttgttctgatgtgtcatgtcaaaaccactgtgacctttcagaatagaatgtttttttctgactaaatctggtgggtgaggaaagggttccatttttatcccttttgtaaaaaataaatatagtctccctttttatgctaagtccacagttttaaataaaacacttacttgtgtttgtgtataccctacactgctgtagcacggagctttaccagtcagtacttcacagccagcaaggtacgaacgttacagggacagagacggaccgcttgagtttgccacaatagcacctagagaaatagcactggggtcagagttctcctgctgtccttaggatgcagggaacgtggagaacaccaaagtccaggcagaaatgaaaggaaagaggcaagaagctctcctgctctgcaaagaagattttatcagcgaatgtactctctggcatagtttacaagaacttctaagccaggcccatggcggactgtgcaaagggaagtcagacgaaagtgactgggccctgaaatctgaccttctgccaagaaattatattttccaagattgggaaaggcacaggaggtgcacattttaatttggctcaaaaataatgaaaattaaccttaaaacttggcaacaattataaaaaccaatgccactttctttgacagaagtacaataaaccaacaaaaagcataccacagttcacgatattcagtgcccatgcatgatggttgggcatgtctatacagaccacatctaaaggactaagtctataaaggaagatccaacaactgacttcacctaaaactccgctttctcatgtcttctttcaaaaacgaatctgcagacagactaagttgctttctgtagaactgcaaacaaagtgctttagtttttagttgttgcaaaagtgatcctacacgccacagatcgtacaggccagagaacacagggacaggcagtcaactcacagcttacctgtaaaaagctaactagggtttcagtgtgatgcatgtaaaccatgaattataagtttcaaaaaacaaaaacaacaaaaccaaccagcagttgtggtgaagtttacatcccttcattcgtatccttacaagacagcactagtacttaggagggttgtaaacataagtccctacgagggtacatctagtctaggaaaagagacattcactacaacgatgtacctgacatctggtacagacctctactgacaagtgtagtgtaacgtgtcctgcggcaggaccctggaggaaggatgtgtccaaagcgctgagacactgtaacagcaagtgtgactgtcatgagacacacggagcaaaccacatgtttaaaaagtcattagaacatcacgttcttggacactagtgtagaaaggtctcccgaagatgaaagagtgtaggcctggcttaattttctcagctagagccattattatgttaaggtcgccctctgctgttaaatcaagatctatcttcaggttccgaagagacttaaagggctttttccccttctgcgtgtcatcctctatgtacttgattagtgtcaaggcttttctgtgaagaatgaggaggaactgtgcaaggaaagtactcctgagagacaggccaggcttcaaatggaagacctgatccagaaaggctttcactagagtgtctctgtgtaagacatcttggaaaatattcaaatcaggagtgaagctctcatctgtgtagatgatggtgtcctgagccatgtcctcttctgaagttgccctccagaaggctgtcagctctgacctcatgtatctgcgttgattataaatatgttcatgacacggtggcatctgcttgacagtgttgacatccacatcgatgtgtgtggtgggataaggggcatacataacttgccggaaaggtagtacaaaactgccagtcgcatcctttagcaagccttgtacaaagagtccagattcgtatttaaaggacgattcggcttcacacagcctggagcacttcctctctgctggtgtcagaaaaaggcacagtgttcttactatcttatttactttctctgcactgctgcctaccaccacagaacagccgcaggtctgcagatgtgagctgatggcattgagaagaaagccttcatgacagctgtcaccaatgtcatcatcattgagtactgtatcagctatatcgaggtcttcaggaacactgtgtgatctcatagacgcaagcagctccatcacagggatgacctccccagtaagcatagggatgatactctgaccctgatcttccatcctctcggtgccttccaagacaattttctggacattttcttgtctttccttgtgcatccatatccttccttttcgaatgatgtgcgttagcctgtcaacacacactctgtgcagtgggaggtagaaactcagctccgtctgcggcagtataattgatagtccgtaagtgctccgatctccgttccagttcccgtcgaagattaatgaaacaataatgacgcccttttcagataagacaaaaaactttacatctattgccccactctccgcattccgaagaatttctccattcagagtgtggttggcaagaaaagtgatttctccatcactgaggagtacttggtctgtctttggagcccaaatgtgccttactctaggaccaagaatattatcccagtaagcaaaggtagccgccaacaagggtgattcaccacttaaagcaatctctgtcttggcaacagcaggagatggtggggggcagatagtcgacatccctgcatcccaggtctcacattatccaaacgcttgcaatagccactcgccgccgctgcgccttcaccgccggcgcagggaccgcaaccgcagccggctccgggccccgccccggccccgccctcccacgcccccgagtccgccccgtcgtagccccgcccccaaccacggccgctccagattctgcaggggtctgtgtccggttctttttaatctggtttccttcttttgtctttggtcaccgttatggagtcaagttgcgatctgaggcaaccaaaacgcacctgcctagcataccctgcctggactgtctagacaccactcccacagagaaggaacaggcaattgggatggctgacactacaaacg

SEQ ID NO: 9 - DNA, 1957 bp, Homo sapiens
  source 1..1957: mol_type = other DNA
acgtaacctacggtgtcccgctaggaaagagaggtgcgtcaaacagcgacaagttccgcccacgtaaaagatgacgcttgatatctccggagcatttggataatgtgacagttggaatgcagtgatgtcgactctttgcccaccgccatctccagctgttgccaagacagagattgctttaagtggcaaatcacctttattagcagctacttttgcttactgggacaatattcttggtcctagagtaaggcacatttgggctccaaagacagaacaggtacttctcagtgatggagaaataacttttcttgccaaccacactctaaatggagaaatccttcgaaatgcagagagtggtgctatagatgtaaagttttttgtcttgtctgaaaagggagtgattattgtttcattaatctttgatggaaactggaatggggatcgcagcacatatggactatcaattatacttccacagacagaacttagtttctacctcccacttcatagagtgtgtgttgatagattaacacatataatccggaaaggaagaatatggatgcataaggaaagacaagaaaatgtccagaagattatcttagaaggcacagagagaatggaagatcagggtcagagtattattccaatgcttactggagaagtgattcctgtaatggaactgctttcatctatgaaatcacacagtgttcctgaagaaatagatatagctgatacagtactcaatgatgatgatattggtgacagctgtcatgaaggctttcttctcaagtaagaatttttcttttcataaaagctggatgaagcagataccatcttatgctcacctatgacaagatttggaagaaagaaaataacagactgtctacttagattgttctagggacattacgtatttgaactgttgcttaaatttgtgttatttttcactcattatatttctatatatatttggtgttattccatttgctatttaaagaaaccgagtttccatcccagacaagaaatcatggccccttgcttgattctggtttcttgttttacttctcattaaagctaacagaatcctttcatattaagttgtactgtagatgaacttaagttatttaggcgtagaacaaaattattcatatttatactgatctttttccatccagcagtggagtttagtacttaagagtttgtgcccttaaaccagactccctggattaatgctgtgtacccgtgggcaaggtgcctgaattctctatacacctatttcctcatctgtaaaatggcaataatagtaatagtacctaatgtgtagggttgttataagcattgagtaagataaataatataaagcacttagaacagtgcctggaacataaaaacacttaataatagctcatagctaacatttcctatttacatttcttctagaaatagccagtatttgttgagtgcctacatgttagttcctttactagttgctttacatgtattatcttatattctgttttaaagtttcttcacagttacagattttcatgaaattttacttttaataaaagagaagtaaaagtataaagtattcacttttatgttcacagtcttttcctttaggctcatgatggagtatcagaggcatgagtgtgtttaacctaagagccttaatggcttgaatcagaagcactttagtcctgtatctgttcagtgtcagcctttcatacatcattttaaatcccatttgactttaagtaagtcacttaatctctctacatgtcaatttcttcagctataaaatgatggtatttcaataaataaatacattaattaaatgatattatactgactaattgggctgttttaaggctcaataagaaaatttctgtgaaaggtctctagaaaatgtaggttcctatacaaataaaagataacattgtgcttataaaaaaaa

SEQ ID NO: 10 - DNA, 1957 bp, Homo sapiens
  source 1..1957: mol_type = other DNA
ttttttttataagcacaatgttatcttttatttgtataggaacctacattttctagagacctttcacagaaattttcttattgagccttaaaacagcccaattagtcagtataatatcatttaattaatgtatttatttattgaaataccatcattttatagctgaagaaattgacatgtagagagattaagtgacttacttaaagtcaaatgggatttaaaatgatgtatgaaaggctgacactgaacagatacaggactaaagtgcttctgattcaagccattaaggctcttaggttaaacacactcatgcctctgatactccatcatgagcctaaaggaaaagactgtgaacataaaagtgaatactttatacttttacttctcttttattaaaagtaaaatttcatgaaaatctgtaactgtgaagaaactttaaaacagaatataagataatacatgtaaagcaactagtaaaggaactaacatgtaggcactcaacaaatactggctatttctagaagaaatgtaaataggaaatgttagctatgagctattattaagtgtttttatgttccaggcactgttctaagtgctttatattatttatcttactcaatgcttataacaaccctacacattaggtactattactattattgccattttacagatgaggaaataggtgtatagagaattcaggcaccttgcccacgggtacacagcattaatccagggagtctggtttaagggcacaaactcttaagtactaaactccactgctggatggaaaaagatcagtataaatatgaataattttgttctacgcctaaataacttaagttcatctacagtacaacttaatatgaaaggattctgttagctttaatgagaagtaaaacaagaaaccagaatcaagcaaggggccatgatttcttgtctgggatggaaactcggtttctttaaatagcaaatggaataacaccaaatatatatagaaatataatgagtgaaaaataacacaaatttaagcaacagttcaaatacgtaatgtccctagaacaatctaagtagacagtctgttattttctttcttccaaatcttgtcataggtgagcataagatggtatctgcttcatccagcttttatgaaaagaaaaattcttacttgagaagaaagccttcatgacagctgtcaccaatatcatcatcattgagtactgtatcagctatatctatttcttcaggaacactgtgtgatttcatagatgaaagcagttccattacaggaatcacttctccagtaagcattggaataatactctgaccctgatcttccattctctctgtgccttctaagataatcttctggacattttcttgtctttccttatgcatccatattcttcctttccggattatatgtgttaatctatcaacacacactctatgaagtgggaggtagaaactaagttctgtctgtggaagtataattgatagtccatatgtgctgcgatccccattccagtttccatcaaagattaatgaaacaataatcactcccttttcagacaagacaaaaaactttacatctatagcaccactctctgcatttcgaaggatttctccatttagagtgtggttggcaagaaaagttatttctccatcactgagaagtacctgttctgtctttggagcccaaatgtgccttactctaggaccaagaatattgtcccagtaagcaaaagtagctgctaataaaggtgatttgccacttaaagcaatctctgtcttggcaacagctggagatggcggtgggcaaagagtcgacatcactgcattccaactgtcacattatccaaatgctccggagatatcaagcgtcatcttttacgtgggcggaacttgtcgctgtttgacgcacctctctttcctagcgggacaccgtaggttacgt

SEQ ID NO: 11 - DNA, 3231 bp, Homo sapiens
  source 1..3231: mol_type = other DNA
ggttgcggtgcctgcgcccgcggcggcggaggcgcaggcggtggcgagtggatatctccggagcatttggataatgtgacagttggaatgcagtgatgtcgactctttgcccaccgccatctccagctgttgccaagacagagattgctttaagtggcaaatcacctttattagcagctacttttgcttactgggacaatattcttggtcctagagtaaggcacatttgggctccaaagacagaacaggtacttctcagtgatggagaaataacttttcttgccaaccacactctaaatggagaaatccttcgaaatgcagagagtggtgctatagatgtaaagttttttgtcttgtctgaaaagggagtgattattgtttcattaatctttgatggaaactggaatggggatcgcagcacatatggactatcaattatacttccacagacagaacttagtttctacctcccacttcatagagtgtgtgttgatagattaacacatataatccggaaaggaagaatatggatgcataaggaaagacaagaaaatgtccagaagattatcttagaaggcacagagagaatggaagatcagggtcagagtattattccaatgcttactggagaagtgattcctgtaatggaactgctttcatctatgaaatcacacagtgttcctgaagaaatagatatagctgatacagtactcaatgatgatgatattggtgacagctgtcatgaaggctttcttctcaatgccatcagctcacacttgcaaacctgtggctgttccgttgtagtaggtagcagtgcagagaaagtaaataagatagtcagaacattatgcctttttctgactccagcagagagaaaatgctccaggttatgtgaagcagaatcatcatttaaatatgagtcagggctctttgtacaaggcctgctaaaggattcaactggaagctttgtgctgcctttccggcaagtcatgtatgctccatatcccaccacacacatagatgtggatgtcaatactgtgaagcagatgccaccctgtcatgaacatatttataatcagcgtagatacatgagatccgagctgacagccttctggagagccacttcagaagaagacatggctcaggatacgatcatctacactgacgaaagctttactcctgatttgaatatttttcaagatgtcttacacagagacactctagtgaaagccttcctggatcaggtctttcagctgaaacctggcttatctctcagaagtactttccttgcacagtttctacttgtccttcacagaaaagccttgacactaataaaatatatagaagacgatacgcagaagggaaaaaagccctttaaatctcttcggaacctgaagatagaccttgatttaacagcagagggcgatcttaacataataatggctctggctgagaaaattaaaccaggcctacactcttttatctttggaagacctttctacactagtgtgcaagaacgagatgttctaatgactttttaaatgtgtaacttaataagcctattccatcacaatcatgatcgctggtaaagtagctcagtggtgtggggaaacgttcccctggatcatactccagaattctgctctcagcaattgcagttaagtaagttacactacagttctcacaagagcctgtgaggggatgtcaggtgcatcattacattgggtgtctcttttcctagatttatgcttttgggatacagacctatgtttacaatataataaatattattgctatcttttaaagatataataataggatgtaaacttgaccacaactactgtttttttgaaatacatgattcatggtttacatgtgtcaaggtgaaatctgagttggcttttacagatagttgactttctatcttttggcattctttggtgtgtagaattactgtaatacttctgcaatcaactgaaaactagagcctttaaatgatttcaattccacagaaagaaagtgagcttgaacataggatgagctttagaaagaaaattgatcaagcagatgtttaattggaattgattattagatcctactttgtggatttagtccctgggattcagtctgtagaaatgtctaatagttctctatagtccttgttcctggtgaaccacagttagggtgttttgtttattttattgttcttgctattgttgatattctatgtagttgagctctgtaaaaggaaattgtattttatgttttagtaattgttgccaactttttaaattaattttcattatttttgagccaaattgaaatgtgcacctcctgtgccttttttctccttagaaaatctaattacttggaacaagttcagatttcactggtcagtcattttcatcttgttttcttcttgctaagtcttaccatgtacctgctttggcaatcattgcaactctgagattataaaatgccttagagaatatactaactaataagatctttttttcagaaacagaaaatagttccttgagtacttccttcttgcatttctgcctatgtttttgaagttgttgctgtttgcctgcaataggctataaggaatagcaggagaaattttactgaagtgctgttttcctaggtgctactttggcagagctaagttatcttttgttttcttaatgcgtttggaccattttgctggctataaaataactgattaatataattctaacacaatgttgacattgtagttacacaaacacaaataaatattttatttaaaattctggaagtaatataaaagggaaaatatatttataagaaagggataaaggtaatagagcccttctgccccccacccaccaaatttacacaacaaaatgacatgttcgaatgtgaaaggtcataatagctttcccatcatgaatcagaaagatgtggacagcttgatgttttagacaaccactgaactagatgactgttgtactgtagctcagtcatttaaaaaatatataaatactaccttgtagtgtcccatactgtgttttttacatggtagattcttatttaagtgctaactggttattttctttggctggtttattgtactgttatacagaatgtaagttgtacagtgaaataagttattaaagcatgtgtaaacattgttatatatcttttctcctaaatggagaattttgaataaaatatatttgaaatttt

SEQ ID NO: 12 - DNA, 3231 bp, Homo sapiens
  source 1..3231: mol_type = other DNA
aaaatttcaaatatattttattcaaaattctccatttaggagaaaagatatataacaatgtttacacatgctttaataacttatttcactgtacaacttacattctgtataacagtacaataaaccagccaaagaaaataaccagttagcacttaaataagaatctaccatgtaaaaaacacagtatgggacactacaaggtagtatttatatattttttaaatgactgagctacagtacaacagtcatctagttcagtggttgtctaaaacatcaagctgtccacatctttctgattcatgatgggaaagctattatgacctttcacattcgaacatgtcattttgttgtgtaaatttggtgggtggggggcagaagggctctattacctttatccctttcttataaatatattttcccttttatattacttccagaattttaaataaaatatttatttgtgtttgtgtaactacaatgtcaacattgtgttagaattatattaatcagttattttatagccagcaaaatggtccaaacgcattaagaaaacaaaagataacttagctctgccaaagtagcacctaggaaaacagcacttcagtaaaatttctcctgctattccttatagcctattgcaggcaaacagcaacaacttcaaaaacataggcagaaatgcaagaaggaagtactcaaggaactattttctgtttctgaaaaaaagatcttattagttagtatattctctaaggcattttataatctcagagttgcaatgattgccaaagcaggtacatggtaagacttagcaagaagaaaacaagatgaaaatgactgaccagtgaaatctgaacttgttccaagtaattagattttctaaggagaaaaaaggcacaggaggtgcacatttcaatttggctcaaaaataatgaaaattaatttaaaaagttggcaacaattactaaaacataaaatacaatttccttttacagagctcaactacatagaatatcaacaatagcaagaacaataaaataaacaaaacaccctaactgtggttcaccaggaacaaggactatagagaactattagacatttctacagactgaatcccagggactaaatccacaaagtaggatctaataatcaattccaattaaacatctgcttgatcaattttctttctaaagctcatcctatgttcaagctcactttctttctgtggaattgaaatcatttaaaggctctagttttcagttgattgcagaagtattacagtaattctacacaccaaagaatgccaaaagatagaaagtcaactatctgtaaaagccaactcagatttcaccttgacacatgtaaaccatgaatcatgtatttcaaaaaaacagtagttgtggtcaagtttacatcctattattatatctttaaaagatagcaataatatttattatattgtaaacataggtctgtatcccaaaagcataaatctaggaaaagagacacccaatgtaatgatgcacctgacatcccctcacaggctcttgtgagaactgtagtgtaacttacttaactgcaattgctgagagcagaattctggagtatgatccaggggaacgtttccccacaccactgagctactttaccagcgatcatgattgtgatggaataggcttattaagttacacatttaaaaagtcattagaacatctcgttcttgcacactagtgtagaaaggtcttccaaagataaaagagtgtaggcctggtttaattttctcagccagagccattattatgttaagatcgccctctgctgttaaatcaaggtctatcttcaggttccgaagagatttaaagggcttttttcccttctgcgtatcgtcttctatatattttattagtgtcaaggcttttctgtgaaggacaagtagaaactgtgcaaggaaagtacttctgagagataagccaggtttcagctgaaagacctgatccaggaaggctttcactagagtgtctctgtgtaagacatcttgaaaaatattcaaatcaggagtaaagctttcgtcagtgtagatgatcgtatcctgagccatgtcttcttctgaagtggctctccagaaggctgtcagctcggatctcatgtatctacgctgattataaatatgttcatgacagggtggcatctgcttcacagtattgacatccacatctatgtgtgtggtgggatatggagcatacatgacttgccggaaaggcagcacaaagcttccagttgaatcctttagcaggccttgtacaaagagccctgactcatatttaaatgatgattctgcttcacataacctggagcattttctctctgctggagtcagaaaaaggcataatgttctgactatcttatttactttctctgcactgctacctactacaacggaacagccacaggtttgcaagtgtgagctgatggcattgagaagaaagccttcatgacagctgtcaccaatatcatcatcattgagtactgtatcagctatatctatttcttcaggaacactgtgtgatttcatagatgaaagcagttccattacaggaatcacttctccagtaagcattggaataatactctgaccctgatcttccattctctctgtgccttctaagataatcttctggacattttcttgtctttccttatgcatccatattcttcctttccggattatatgtgttaatctatcaacacacactctatgaagtgggaggtagaaactaagttctgtctgtggaagtataattgatagtccatatgtgctgcgatccccattccagtttccatcaaagattaatgaaacaataatcactcccttttcagacaagacaaaaaactttacatctatagcaccactctctgcatttcgaaggatttctccatttagagtgtggttggcaagaaaagttatttctccatcactgagaagtacctgttctgtctttggagcccaaatgtgccttactctaggaccaagaatattgtcccagtaagcaaaagtagctgctaataaaggtgatttgccacttaaagcaatctctgtcttggcaacagctggagatggcggtgggcaaagagtcgacatcactgcattccaactgtcacattatccaaatgctccggagatatccactcgccaccgcctgcgcctccgccgccgcgggcgcaggcaccgcaacc

SEQ ID NO: 13 - DNA, 27321 bp, Homo sapiens
  source 1..27321: mol_type = other DNA
acgtaacctacggtgtcccgctaggaaagagaggtgcgtcaaacagcgacaagttccgcccacgtaaaagatgacgcttggtgtgtcagccgtccctgctgcccggttgcttctcttttgggggcggggtctagcaagagcaggtgtgggtttaggaggtgtgtgtttttgtttttcccaccctctctccccactacttgctctcacagtactcgctgagggtgaacaagaaaagacctgataaagattaaccagaagaaaacaaggagggaaacaaccgcagcctgtagcaagctctggaactcaggagtcgcgcgctaggggccggggccggggccggggcgtggtcggggcgggcccgggggcgggcccggggcggggctgcggttgcggtgcctgcgcccgcggcggcggaggcgcaggcggtggcgagtgggtgagtgaggaggcggcatcctggcgggtggctgtttggggttcggctgccgggaagaggcgcgggtagaagcgggggctctcctcagagctcgacgcatttttactttccctctcatttctctgaccgaagctgggtgtcgggctttcgcctctagcgactggtggaattgcctgcatccgggccccgggcttcccggcggcggcggcggcggcggcggcgcagggacaagggatggggatctggcctcttccttgctttcccgccctcagtacccgagctgtctccttcccggggacccgctgggagcgctgccgctgcgggctcgagaaaagggagcctcgggtactgagaggcctcgcctgggggaaggccggagggtgggcggcgcgcggcttctgcggaccaagtcggggttcgctaggaacccgagacggtccctgccggcgaggagatcatgcgggatgagatgggggtgtggagacgcctgcacaatttcagcccaagcttctagagagtggtgatgacttgcatatgagggcagcaatgcaagtcggtgtgctccccattctgtgggacatgacctggttgcttcacagctccgagatgacacagacttgcttaaaggaagtgactattgtgacttgggcatcacttgactgatggtaatcagttgtctaaagaagtgcacagattacatgtccgtgtgctcattgggtctatctggccgcgttgaacaccaccaggctttgtattcagaaacaggagggaggtcctgcactttcccaggaggggtggccctttcagatgcaatcgagattgttaggctctgggagagtagttgcctggttgtggcagttggtaaatttctattcaaacagttgccatgcaccagttgttcacaacaagggtacgtaatctgtctggcattacttctacttttgtacaaaggatcaaaaaaaaaaaagatactgttaagatatgatttttctcagactttgggaaacttttaacataatctgtgaatatcacagaaacaagactatcatataggggatattaataacctggagtcagaatacttgaaatacggtgtcatttgacacgggcattgttgtcaccacctctgccaaggcctgccactttaggaaaaccctgaatcagttggaaactgctacatgctgatagtacatctgaaacaagaacgagagtaattaccacattccagattgttcactaagccagcatttacctgctccaggaaaaaattacaagcaccttatgaagttgataaaatattttgtttggctatgttggcactccacaatttgctttcagagaaacaaagtaaaccaaggaggacttctgtttttcaagtctgccctcgggttctattctacgttaattagatagttcccaggaggactaggttagcctacctattgtctgagaaacttggaactgtgagaaatggccagatagtgatatgaacttcaccttccagtcttccctgatgttgaagattgagaaagtgttgtgaactttctggtactgtaaacagttcactgtccttgaagtggtcctgggcagctcctgttgtggaaagtggacggtttaggatcctgcttctctttgggctgggagaaaataaacagcatggttacaagtattgagagccaggttggagaaggtggcttacacctgtaatgccagagctttgggaggcggaggcaagaggatcacttgaagccaggagttcaagctcaacctgggcaacgtagaccctgtctctacaaaaaattaaaaacttagccgggcgtggtgatgtgcacctgtagtcctagctacttgggaggctgaggcaggagggtcatttgagcccaagagtttgaagttaccgagagctatgatcctgccagtgcattccagcctggatgacaaaacgagaccctgtctctaaaaaacaagaagtgagggctttatgattgtagaattttcactacaatagcagtggaccaaccacctttctaaataccaatcagggaagagatggttgattttttaacagacgtttaaagaaaaagcaaaacctcaaacttagcactctactaacagttttagcagatgttaattaatgtaatcatgtctgcatgtatgggattatttccagaaagtgtattgggaaacctctcatgaaccctgtgagcaagccaccgtctcactcaatttgaatcttggcttccctcaaaagactggctaatgtttggtaactctctggagtagacagcactacatgtacgtaagataggtacataaacaactattggttttgagctgatttttttcagctgcatttgcatgtatggatttttctcaccaaagacgatgacttcaagtattagtaaaataattgtacagctctcctgattatacttctctgtgacatttcatttcccaggctatttcttttggtaggatttaaaactaagcaattcagtatgatctttgtccttcattttctttcttattctttttgtttgtttgtttgtttgtttttttcttgaggcagagtctctctctgtcgcccaggctggagtgcagtggcgccatctcagctcattgcaacctctgccacctccgggttcaagagattctcctgcctcagcctcccgagtagctgggattacaggtgtccaccaccacacccggctaattttttgtatttttagtagaggtggggtttcaccatgttggccaggctggtcttgagctcctgacctcaggtgatccacctgcctcggcctaccaaagagctgggataacaggtgtgacccaccatgcccggcccattttttttttcttattctgttaggagtgagagtgtaactagcagtataatagttcaattttcacaacgtggtaaaagtttccctataattcaatcagattttgctccagggttcagttctgttttaggaaatacttttattttcagtttaatgatgaaatattagagttgtaatattgcctttatgattatccacctttttaacctaaaagaatgaaagaaaaatatgtttgcaatataattttatggttgtatgttaacttaattcattatgttggcctccagtttgctgttgttagttatgacagcagtagtgtcattaccatttcaattcagattacattcctatatttgatcattgtaaactgactgcttacattgtattaaaaacagtggatattttaaagaagctgtacggcttatatctagtgctgtctcttaagactattaaattgatacaacatatttaaaagtaaatattacctaaatgaatttttgaaattacaaatacacgtgttaaaactgtcgttgtgttcaaccatttctgtacatacttagagttaactgttttgccaggctctgtatgcctactcataatatgataaaagcactcatctaatgctctgtaaatagaagtcagtgctttccatcagactgaactctcttgacaagatgtggatgaaattctttaagtaaaattgtttactttgtcatacatttacagatcaaatgttagctcccaaagcaatcatatggcaaagataggtatatcatagtttgcctattagctgctttgtattgctattattataaatagacttcacagttttagacttgcttaggtgaaattgcaattctttttactttcagtcttagataacaagtcttcaattatagtacaatcacacattgcttaggaatgcatcattaggcgattttgtcattatgcaaacatcatagagtgtacttacacaaacctagatagtatagcctttatgtacctaggccgtatggtatagtctgttgctcctaggccacaaacctgtacaactgttactgtactgaatactatagacagttgtaacacagtggtaaatatttatctaaatatatgcaaacagagaaaaggtacagtaaaagtatggtataaaagataatggtatacctgtgtaggccacttaccacgaatggagcttgcaggactagaagttgctctgggtgagtcagtgagtgagtggtgaattaatgtgaaggcctagaacactgtacaccactgtagactataaacacagtacgctgaagctacaccaaatttatcttaacagtttttcttcaataaaaaattataactttttaactttgtaaactttttaattttttaacttttaaaatacttagcttgaaacacaaatacattgtatagctatacaaaaatattttttctttgtatccttattctagaagcttttttctattttctattttaaatttttttttttacttgttagtcgtttttgttaaaaactaaaacacacacactttcacctaggcatagacaggattaggatcatcagtatcactcccttccacctcactgccttccacctccacatcttgtcccactggaaggtttttaggggcaataacacacatgtagctgtcacctatgataacagtgctttctgttgaatacctcctgaaggacttgcctgaggctgttttacatttaacttaaaaaaaaaaaaagtagaaggagtgcactctaaaataacaataaaaggcatagtatagtgaatacataaaccagcaatgtagtagtttattatcaagtgttgtacactgtaataattgtatgtgctatactttaaataacttgcaaaatagtactaagaccttatgatggttacagtgtcactaaggcaatagcatattttcaggtccattgtaatctaatgggactaccatcatatatgcagtctaccattgactgaaacgttacatggcacataactgtatttgcaagaatgatttgttttacattaatatcacataggatgtacctttttagagtggtatgtttatgtggattaagatgtacaagttgagcaaggggaccaagagccctgggttctgtcttggatgtgagcgtttatgttcttctcctcatgtctgttttctcattaaattcaaaggcttgaacgggccctatttagcccttctgttttctacgtgttctaaataactaaagcttttaaattctagccatttagtgtagaactctctttgcagtgatgaaatgctgtattggtttcttggctagcatattaaatatttttatctttgtcttgatacttcaatgtcgttttaaacatcaggatcgggcttcagtattctcataaccagagagttcactgaggatacaggactgtttgcccattttttgttatggctccagacttgtggtatttccatgtctttttttttttttttttttttgaccttttagcggctttaaagtatttctgttgttaggtgttgtattacttttctaagattacttaacaaagcaccacaaactgagtggctttaaacaacagcaatttattctctcacaattctagaagctagaagtccgaaatcaaagtgttgacaggggcatgatcttcaagagagaagactctttccttgcctcttcctggcttctggtggttaccagcaatcctgagtgttcctttcttgccttgtagtttcaacaatccagtatctgccttttgtcttcacatggctgtctaccatttgtctctgtgtctccaaatctctctccttataaacacagcagttattggattaggccccactctaatccagtatgaccccattttaacatgattacacttatttctagataaggtcacattcacgtacaccaagggttaggaattgaacatatctttttgggggacacaattcaacccacaagtgtcagtctctagctgagcctttcccttcctgtttttctcctttttagttgctatgggttaggggccaaatctccagtcatactagaattgcacatggactggatatttgggaatactgcgggtctattctatgagctttagtatgtaacatttaatatcagtgtaaagaagcccttttttaagttatttctttgaatttctaaatgtatgccctgaatataagtaacaagttaccatgtcttgtaaaatgatcatatcaacaaacatttaatgtgcacctactgtgctagttgaatgtctttatcctgataggagataacaggattccacatctttgacttaagaggacaaaccaaatatgtctaaatcatttggggttttgatggatatctttaaattgctgaacctaatcattggtttcatatgtcattgtttagatatctccggagcatttggataatgtgacagttggaatgcagtgatgtcgactctttgcccaccgccatctccagctgttgccaagacagagattgctttaagtggcaaatcacctttattagcagctacttttgcttactgggacaatattcttggtcctagagtaaggcacatttgggctccaaagacagaacaggtacttctcagtgatggagaaataacttttcttgccaaccacactctaaatggagaaatccttcgaaatgcagagagtggtgctatagatgtaaagttttttgtcttgtctgaaaagggagtgattattgtttcattaatctttgatggaaactggaatggggatcgcagcacatatggactatcaattatacttccacagacagaacttagtttctacctcccacttcatagagtgtgtgttgatagattaacacatataatccggaaaggaagaatatggatgcataaggtaagtgatttttcagcttattaatcatgttaacctatctgttgaaagcttattttctggtacatataaatcttatttttttaattatatgcagtgaacatcaaacaataaatgttatttattttgcatttaccctattagatacaaatacatctggtctgatacctgtcatcttcatattaactgtggaaggtacgaaatggtagctccacattatagatgaaaagctaaagcttagacaaataaagaaacttttagaccctggattcttcttgggagcctttgactctaataccttttgtttccctttcattgcacaattctgtcttttgcttactactatgtgtaagtataacagttcaaagtaatagtttcataagctgttggtcatgtagcctttggtctctttaacctctttgccaagttcccaggttcataaaatgaggaggttgaatggaatggttcccaagagaattccttttaatcttacagaaattattgttttcctaaatcctgtagttgaatatataatgctatttacatttcagtatagttttgatgtatctaaagaacacattgaattctccttcctgtgttccagtttgatactaacctgaaagtccattaagcattaccagttttaaaaggcttttgcccaatagtaaggaaaaataatatcttttaaaagaataattttttactatgtttgcaggcttacttccttttttctcacattatgaaactcttaaaatcaggagaatcttttaaacaacatcataatgtttaatttgaaaagtgcaagtcattcttttcctttttgaaactatgcagatgttacattgactgttttctgtgaagttatctttttttcactgcagaataaaggttgttttgattttattttgtattgtttatgagaacatgcatttgttgggttaatttcctacccctgcccccattttttccctaaagtagaaagtatttttcttgtgaactaaattactacacaagaacatgtctattgaaaaataagcaagtatcaaaatgttgtgggttgtttttttaaataaattttctcttgctcaggaaagacaagaaaatgtccagaagattatcttagaaggcacagagagaatggaagatcaggtatatgcaaattgcatactgtcaaatgtttttctcacagcatgtatctgtataaggttgatggctacatttgtcaaggccttggagacatacgaataagcctttaatggagcttttatggaggtgtacagaataaactggaggaagatttccatatcttaaacccaaagagttaaatcagtaaacaaaggaaaatagtaattgcatctacaaattaatatttgctccctttttttttctgtttgcccagaataaattttggataacttgttcatagtaaaaataaaaaaaattgtctctgatatgttctttaaggtactacttctcgaacctttccctagaagtagctgtaacagaaggagagcatatgtacccctgaggtatctgtctggggtgtaggcccaggtccacacaatatttcttctaagtcttatgttgtatcgttaagactcatgcaatttacattttattccataactattttagtattaaaatttgtcagtgatatttcttaccctctcctctaggaaaatgtgccatgtttatcccttggctttgaatgcccctcaggaacagacactaagagtttgagaagcatggttacaagggtgtggcttcccctgcggaaactaagtacagactatttcactgtaaagcagagaagttcttttgaaggagaatctccagtgaagaaagagttcttcacttttacttccatttcctcttgtgggtgaccctcaatgctccttgtaaaactccaatattttaaacatggctgttttgcctttctttgcttctttttagcatgaatgagacagatgatactttaaaaaagtaattaaaaaaaaaaacttgtgaaaatacatggccataatacagaacccaatacaatgatctcctttaccaaattgttatgtttgtacttttgtagatagctttccaattcagagacagttattctgtgtaaaggtctgacttaacaagaaaagatttccctttacccaaagaatcccagtccttatttgctggtcaataagcagggtccccaggaatggggtaactttcagcaccctctaacccactagttattagtagactaattaagtaaacttatcgcaagttgaggaaacttagaaccaactaaaattctgcttttactgggattttgttttttcaaaccagaaacctttacttaagttgactactattaatgaattttggtctctcttttaagtgctcttcttaaaaatgttatcttactgctgagaagttcaagtttgggaagtacaaggaggaatagaaacttaagagattttcttttagagcctcttctgtatttagccctgtaggatttttttttttttttttttttttggtgttgttgagcttcagtgaggctattcattcacttatactgataatgtctgagatactgtgaatgaaatactatgtatgcttaaacctaagaggaaatattttcccaaaattattcttcccgaaaaggaggagttgccttttgattgagttcttgcaaatctcacaacgactttattttgaacaatactgtttggggatgatgcattagtttgaaacaacttcagttgtagctgtcatctgataaaattgcttcacagggaaggaaatttaacacggatctagtcattattcttgttagattgaatgtgtgaattgtaattgtaaacaggcatgataattattactttaaaaactaaaaacagtgaatagttagttgtggaggttactaaaggatggtttttttttaaataaaactttcagcattatgcaaatgggcatatggcttaggataaaacttccagaagtagcatcacatttaaattctcaagcaacttaataatatggggctctgaaaaactggttaaggttactccaaaaatggccctgggtctgacaaagattctaacttaaagatgcttatgaagactttgagtaaaatcatttcataaaataagtgaggaaaaacaactagtattaaattcatcttaaataatgtatgatttaaaaaatatgtttagctaaaaatgcatagtcatttgacaatttcatttatatctcaaaaaatttacttaaccaagttggtcacaaaactgatgagactggtggtggtagtgaataaatgagggaccatccatatttgagacactttacatttgtgatgtgttatactgaattttcagtttgattctatagactacaaatttcaaaattacaatttcaagatgtaataagtagtaatatcttgaaatagctctaaagggaatttttctgttttattgattcttaaaatatatgtgctgattttgatttgcatttgggtagattatacttttatgagtatggaggttaggtattgattcaagttttccttacctatttggtaaggatttcaaagtctttttgtgcttggttttcctcatttttaaatatgaaatatattgatgacctttaacaaattttttttatctcaaattttaaaggagatcttttctaaaagaggcatgatgacttaatcattgcatgtaacagtaaacgataaaccaatgattccatactctctaaagaataaaagtgagctttagggccgggcatggtcagaaatttgacaccaacctggccaacatggcgaaaccccgtctctactaaaaatacaaaaatcagccgggcatggtggcggcacctatagtcccagctacttgggaggatgagacaggagagtcacttgaacctgggaggagaggttgcagtgagctgagatcacgccattgcactccagcctgagcaatgaaagcaaaactccatctcaaaaaaaaaaaaagaaaagaaagaataaaagtgagctttggattgcatataaatcctttagacatgtagtagacttgtttgatactgtgtttgaacaaattacgaagtattttcatcaaagaatgttattgtttgatgttatttttattttttattgcccagcttctctcatattacgtgattttcttcacttcatgtcactttattgtgcagggtcagagtattattccaatgcttactggagaagtgattcctgtaatggaactgctttcatctatgaaatcacacagtgttcctgaagaaatagatgtaagtttaaatgagagcaattatacactttatgagttttttggggttatagtattattatgtatattattaatattctaattttaatagtaaggactttgtcatacatactattcacatacagtattagccactttagcaaataagcacacacaaaatcctggattttatggcaaaacagaggcatttttgatcagtgatgacaaaattaaattcattttgtttatttcattacttttataattcctaaaagtgggaggatcccagctcttataggagcaattaatatttaatgtagtgtcttttgaaacaaaactgtgtgccaaagtagtaaccattaatggaagtttacttgtagtcacaaatttagtttccttaatcatttgttgaggacgttttgaatcacacactatgagtgttaagagatacctttaggaaactattcttgttgttttctgattttgtcatttaggttagtctcctgattctgacagctcagaagaggaagttgttcttgtaaaaattgtttaacctgcttgaccagctttcacatttgttcttctgaagtttatggtagtgcacagagattgttttttggggagtcttgattctcggaaatgaaggcagtgtgttatattgaatccagacttccgaaaacttgtatattaaaagtgttatttcaacactatgttacagccagactaatttttttattttttgatgcattttagatagctgatacagtactcaatgatgatgatattggtgacagctgtcatgaaggctttcttctcaagtaagaatttttcttttcataaaagctggatgaagcagataccatcttatgctcacctatgacaagatttggaagaaagaaaataacagactgtctacttagattgttctagggacattacgtatttgaactgttgcttaaatttgtgttatttttcactcattatatttctatatatatttggtgttattccatttgctatttaaagaaaccgagtttccatcccagacaagaaatcatggccccttgcttgattctggtttcttgttttacttctcattaaagctaacagaatcctttcatattaagttgtactgtagatgaacttaagttatttaggcgtagaacaaaattattcatatttatactgatctttttccatccagcagtggagtttagtacttaagagtttgtgcccttaaaccagactccctggattaatgctgtgtacccgtgggcaaggtgcctgaattctctatacacctatttcctcatctgtaaaatggcaataatagtaatagtacctaatgtgtagggttgttataagcattgagtaagataaataatataaagcacttagaacagtgcctggaacataaaaacacttaataatagctcatagctaacatttcctatttacatttcttctagaaatagccagtatttgttgagtgcctacatgttagttcctttactagttgctttacatgtattatcttatattctgttttaaagtttcttcacagttacagattttcatgaaattttacttttaataaaagagaagtaaaagtataaagtattcacttttatgttcacagtcttttcctttaggctcatgatggagtatcagaggcatgagtgtgtttaacctaagagccttaatggcttgaatcagaagcactttagtcctgtatctgttcagtgtcagcctttcatacatcattttaaatcccatttgactttaagtaagtcacttaatctctctacatgtcaatttcttcagctataaaatgatggtatttcaataaataaatacattaattaaatgatattatactgactaattgggctgttttaaggctcaataagaaaatttctgtgaaaggtctctagaaaatgtaggttcctatacaaataaaagataacattgtgcttatagcttcggtgtttatcatataaagctattctgagttatttgaagagctcacctacttttttttgtttttagtttgttaaattgttttataggcaatgtttttaatctgttttctttaacttacagtgccatcagctcacacttgcaaacctgtggctgttccgttgtagtaggtagcagtgcagagaaagtaaataaggtagtttattttataatctagcaaatgatttgactctttaagactgatgatatatcatggattgtcatttaaatggtaggttgcaattaaaatgatctagtagtataaggaggcaatgtaatctcatcaaattgctaagacaccttgtggcaacagtgagtttgaaataaactgagtaagaatcatttatcagtttattttgatagctcggaaataccagtgtcagtagtgtataaatggttttgagaatatattaaaatcagatatataaaaaaaattactcttctatttcccaatgttatctttaacaaatctgaagatagtcatgtacttttggtagtagttccaaagaaatgttatttgtttattcatcttgatttcattgtcttcgctttccttctaaatctgtcccttctagggagctattgggattaagtggtcattgattattatactttattcagtaatgtttctgaccctttccttcagtgctacttgagttaattaaggattaatgaacagttacatttccaagcattagctaataaactaaaggattttgcacttttcttcactgaccattagttagaaagagttcagagataagtatgtgtatctttcaatttcagcaaacctaattttttaaaaaaagttttacataggaaatatgttggaaatgatactttacaaagatattcataatttttttttgtaatcagctactttgtatatttacatgagccttaatttatatttctcatataaccatttatgagagcttagtatacctgtgtcattatattgcatctacgaactagtgaccttattccttctgttacctcaaacaggtggctttccatctgtgatctccaaagccttaggttgcacagagtgactgccgagctgctttatgaagggagaaaggctccatagttggagtgtttttttttttttttttaaacatttttcccatcctccatcctcttgagggagaatagcttaccttttatcttgttttaatttgagaaagaagttgccaccactctaggttgaaaaccactcctttaacataataactgtggatatggtttgaatttcaagatagttacatgcctttttatttttcctaatagagctgtaggtcaaatattattagaatcagatttctaaatcccacccaatgacctgcttattttaaatcaaattcaataattaattctcttctttttggaggatctggacattctttgatatttcttacaacgaatttcatgtgtagacccactaaacagaagctataaaagttgcatggtcaaataagtctgagaaagtctgcagatgatataattcacctgaagagtcacagtatgtagccaaatgttaaaggttttgagatgccatacagtaaatttaccaagcattttctaaatttatttgaccacagaatccctattttaagcaacaactgttacatcccatggattccaggtgactaaagaatacttatttcttaggatatgttttattgataataacaattaaaatttcagatatctttcataagcaaatcagtggtctttttacttcatgttttaatgctaaaatattttcttttatagatagtcagaacattatgcctttttctgactccagcagagagaaaatgctccaggttatgtgaagcagaatcatcatttaaatatgagtcagggctctttgtacaaggcctgctaaaggtatagtttctagttatcacaagtgaaaccacttttctaaaatcatttttgagactctttatagacaaatcttaaatattagcatttaatgtatctcatattgacatgcccagagactgacttcctttacacagttctgcacatagactatatgtcttatggatttatagttagtatcatcagtgaaacaccatagaataccctttgtgttccaggtgggtccctgttcctacatgtctagcctcaggacttttttttttttaacacatgcttaaatcaggttgcacatcaaaaataagatcatttctttttaactaaatagatttgaattttattgaaaaaaaattttaaacatctttaagaagcttataggatttaagcaattcctatgtatgtgtactaaaatatatatatttctatatataatatatattagaaaaaaattgtatttttcttttatttgagtctactgtcaaggagcaaaacagagaaatgtaaattagcaattatttataatacttaaagggaagaaagttgttcaccttgttgaatctattattgttatttcaattatagtcccaagacgtgaagaaatagctttcctaatggttatgtgattgtctcatagtgactactttcttgaggatgtagccacggcaaaatgaaataaaaaaatttaaaaattgttgcaaatacaagttatattaggcttttgtgcattttcaataatgtgctgctatgaactcagaatgatagtatttaaatatagaaactagttaaaggaaacgtagtttctatttgagttatacatatctgtaaattagaacttctcctgttaaaggcataataaagtgcttaatacttttgtttcctcagcaccctctcatttaattatataattttagttctgaaagggacctataccagatgcctagaggaaatttcaaaactatgatctaatgaaaaaatatttaatagttctccatgcaaatacaaatcatatagttttccagaaaatacctttgacattatacaaagatgattatcacagcattataatagtaaaaaaatggaaatagcctctttcttctgttctgttcatagcacagtgcctcatacgcagtaggttattattacatggtaactggctaccccaactgattaggaaagaagtaaatttgttttataaaaatacatactcattgaggtgcatagaataattaagaaattaaaagacacttgtaattttgaatccagtgaatacccactgttaatatttggtatatctctttctagtctttttttcccttttgcatgtattttctttaagactcccacccccactggatcatctctgcatgttctaatctgcttttttcacagcagattctaagcctctttgaatatcaacacaaacttcaacaacttcatctatagatgccaaataataaattcatttttatttacttaaccacttcctttggatgcttaggtcattctgatgttttgctattgaaaccaatgctatactgaacacttctgtcactaaaactttgcacacactcatgaatagcttcttaggataaatttttagagatggatttgctaaatcagagaccattttttaaaattaaaaaacaattattcatatcgtttggcatgtaagacagtaaattttccttttattttgacaggattcaactggaagctttgtgctgcctttccggcaagtcatgtatgctccatatcccaccacacacatagatgtggatgtcaatactgtgaagcagatgccaccctgtcatgaacatatttataatcagcgtagatacatgagatccgagctgacagccttctggagagccacttcagaagaagacatggctcaggatacgatcatctacactgacgaaagctttactcctgatttgtacgtaatgctctgcctgctggtactgtagtcaagcaatatgaaattgtgtcttttacgaataaaaacaaaacagaagttgcatttaaaaagaaagaaatattaccagcagaattatgcttgaagaaacatttaatcaagcatttttttcttaaatgttcttctttttccatacaattgtgtttaccctaaaataggtaagattaacccttaaagtaaatatttaactatttgtttaataaatatatattgagctcctaggcactgttctaggtaccgggcttaatagtggccaaccagacagccccagccccagcccctacattgtgtatagtctattatgtaacagttattgaatggacttattaacaaaaccaaagaagtaattctaagtcttttttttcttgacatatgaatataaaatacagcaaaactgttaaaatatattaatggaacatttttttactttgcattttatattgttattcacttcttatttttttttaaaaaaaaaagcctgaacagtaaattcaaaaggaaaagtaatgataattaattgttgagcatggacccaacttgaaaaaaaaaatgatgatgataaatctataatcctaaaaccctaagtaaacacttaaaagatgttctgaaatcaggaaaagaattatagtatacttttgtgtttctcttttatcagttgaaaaaaggcacagtagctcatgcctgtaagaacagagctttgggagtgcaaggcaggcggatcacttgaggccaggagttccagaccagcctgggcaacatagtgaaaccccatctctacaaaaaataaaaaagaattattggaatgtgtttctgtgtgcctgtaatcctagctattccgaaagctgaggcaggaggatcttttgagcccaggagtttgaggttacagggagttatgatgtgccagtgtactccagcctggggaacaccgagactctgtcttatttaaaaaaaaaaaaaaaaaaatgcttgcaataatgcctggcacatagaaggtaacagtaagtgttaactgtaataacccaggtctaagtgtgtaaggcaatagaaaaattggggcaaataagcctgacctatgtatctacagaatcagtttgagcttaggtaacagacctgtggagcaccagtaattacacagtaagtgttaaccaaaagcatagaataggaatatcttgttcaagggacccccagccttatacatctcaaggtgcagaaagatgacttaatataggacccattttttcctagttctccagagtttttattggttcttgagaaagtagtaggggaatgttttagaaaatgaattggtccaactgaaattacatgtcagtaagtttttatatattggtaaattttagtagacatgtagaagttttctaattaatctgtgccttgaaacattttcttttttcctaaagtgcttagtattttttccgttttttgattggttacttgggagcttttttgaggaaatttagtgaactgcagaatgggtttgcaaccatttggtatttttgttttgttttttagaggatgtatgtgtattttaacatttcttaatcatttttagccagctatgtttgttttgctgatttgacaaactacagttagacagctattctcattttgctgatcatgacaaaataatatcctgaatttttaaattttgcatccagctctaaattttctaaacataaaattgtccaaaaaatagtattttcagccactagattgtgtgttaagtctattgtcacagagtcattttacttttaagtatatgtttttacatgttaattatgtttgttatttttaattttaactttttaaaataattccagtcactgccaatacatgaaaaattggtcactggaattttttttttgacttttattttaggttcatgtgtacatgtgcaggtgtgttatacaggtaaattgcgtgtcatgagggtttggtgtacaggtgatttcattacccaggtaataagcatagtacccaataggtagttttttgatcctcacccttctcccaccctcaagtaggccctggtgttgctgtttccttctttgtgtccatgtatactcagtgtttagctcccacttagaagtgagaacatgcggtagttggttttctgttcctggattagttcacttaggataatgacctctagctccatctggtttttatggctgcatagtattccatggtgtatatgtatcacattttctttatccagtctaccattgataggcatttaggttgattccctgtctttgttatcatgaatagtgctgtgatgaacatacacatgcatgtgtctttatggtagaaaaatttgtattcctttaggtacatatagaataatggggttgctagggtgaatggtagttctattttcagttatttgagaaatcttcaaactgcttttcataatagctaaactaatttacagtcccgccagcagtgtataagtgttcccttttctccacaaccttgccaacatctgtgattttttgactttttaataatagccattcctagagaattgatttgcaattctctattagtgatattaagcattttttcatatgctttttagctgtctgtatatattcttctgaaaaattttcatgtcctttgcccagtttgtagtggggtgggttgttttttgcttgttaattagttttaagttccttccagattctgcatatccctttgttggatacatggtttgcagatatttttctcccattgtgtaggttgtcttttactctgttgatagtttcttttgccatgcaggagctcgttaggtcccatttgtgtttgtttttgttgcagttgcttttggcgtcttcatcataaaatctgtgccagggcctatgtccagaatggtatttcctaggttgtcttccagggtttttacaattttagattttacgtttatgtctttaatccatcttgagttgatttttgtatatggcacaaggaaggggtccagtttcactccaattcctatggctagcaattatcccagcaccatttattgaatacggagtcctttccccattgcttgttttttgtcaactttgttgaagatcagatggttgtaagtgtgtggctttatttcttggctctctattctccattggtctatgtgtctgtttttataacagtaccctgctgttcaggttcctatagccttttagtataaaatcggctaatgtgatgcctccagctttgttctttttgcttaggattgctttggctatttgggctcctttttgggtccatattaattttaaaacagttttttctggttttgtgaaggatatcattggtagtttataggaatagcattgaatctgtagattgctttgggcagtatggccattttaacaatattaattcttcctatctatgaatatggaatgtttttccatgtgtttgtgtcatctctttatacctgatgtataaagaaaagctggtattattcctactcaatctgttccaaaaaattgaggaggaggaactcttccctaatgaggccagcatcattctgataccaaaacctggcagagacacaacagaaaaaagaaaacttcaggccaatatccttgatgaatatagatgcaaaaatcctcaacaaaatactagcaaaccaaatccagcagcacatcaaaaagctgatctactttgatcaagtaggctttatccctgggatgcaaggttggttcaacatacacaaatcaataagtgtgattcatcacataaacagagctaaaaacaaaaaccacaagattatctcaataggtagagaaaaggttgtcaataaaatttaacatcctccatgttaaaaaccttcagtaggtcaggtgtagtgactcacacctgtaatcccagcactttgggaggccaaggcgggcatatctcttaagcccaggagttcaagacgagcctaggcagcatggtgaaaccccatctctacaaaaaaaaaaaaaaaaaaaaattagcttggtatggtgacatgcacctatagtcccagctattcaggaggttgaggtgggaggattgtttgagcccgggaggcagaggttggcagcgagctgagatcatgccaccgcactccagcctgggcaacggagtgagaccctgtctcaaaaaagaaaaatcacaaacaatcctaaacaaactaggcattgaaggaacatgcctcaaaaaaataagaaccatctatgacagacccatagccaatatcttaccaaatgggcaaaagctggaagtattctccttgagaaccgtaacaagacaaggatgtccactctcaccactccttttcagcatagttctggaagtcctagccagagcaatcaggaaagagaaagaaagaaagacattcagataggaagagaagaagtcaaactatttctgtttgcaggcagtataattctgtacctagaaaatctcatagtctctgcccagaaactcctaaatctgttaaaaatttcagcaaagttttggcattctctatactccaacaccttccaaagtgagagcaaaatcaagaacacagtcccattcacaatagccgcaaaacgaataaaatacctaggaatccagctaaccagggaggtgaaagatctctatgagaattacaaaacactgctgaaagaaatcagagatgacacaaacaaatggaaatgttcttttttaacaccttgctttatctaattcacttatgatgaagatactcattcagtggaacaggtataataagtccactcgattaaatataagccttattctctttccagagcccaagaaggggcactatcagtgcccagtcaataatgacgaaatgctaatatttttcccctttacggtttctttcttctgtagtgtggtacactcgtttcttaagataaggaaacttgaactaccttcctgtttgcttctacacatacccattctctttttttgccactctggtcaggtataggatgatccctaccactttcagttaaaaactcctcctcttactaaatgttctcttaccctctggcctgagtagaacctagggaaaatggaagagaaaaagatgaaagggaggtggggcctgggaagggaataagtagtcctgtttgtttgtgtgtttgctttagcacctgctatatcctaggtgctgtgttaggcacacattattttaagtggccattatattactactactcactctggtcgttgccaaggtaggtagtactttcttggatagttggttcatgttacttacagatggtgggcttgttgaggcaaacccagtggataatcatcggagtgtgttctctaatctcactcaaatttttcttcacattttttggtttgttttggtttttgatggtagtggcttatttttgttgctggtttgttttttgtttttttttgagatggcaagaattggtagttttatttattaattgcctaagggtctctactttttttaaaagatgagagtagtaaaatagattgatagatacatacatacccttactggggactgcttatattctttagagaaaaaattacatattagcctgacaaacaccagtaaaatgtaaatatatccttgagtaaataaatgaatgtatattttgtgtctccaaatatatatatctatattcttacaaatgtgtttatatgtaatatcaatttataagaacttaaaatgttggctcaagtgagggattgtggaaggtagcattatatggccatttcaacatttgaacttttttcttttcttcattttcttcttttcttcaggaatatttttcaagatgtcttacacagagacactctagtgaaagccttcctggatcaggtaaatgttgaacttgagattgtcagagtgaatgatatgacatgttttcttttttaatatatcctacaatgcctgttctatatatttatattcccctggatcatgccccagagttctgctcagcaattgcagttaagttagttacactacagttctcagaagagtctgtgagggcatgtcaagtgcatcattacattggttgcctcttgtcctagatttatgcttcgggaattcagacctttgtttacaatataataaatattattgctatcttttaaagatataataataagatataaagttgaccacaactactgttttttgaaacatagaattcctggtttacatgtatcaaagtgaaatctgacttagcttttacagatataatatatacatatatatatcctgcaatgcttgtactatatatgtagtacaagtatatatatatgtttgtgtgtgtatatatatatagtacgagcatatatacatattaccagcattgtaggatatatatatgtttatatattaaaaaaaagttataaacttaaaaccctattatgttatgtagagtatatgttatatatgatatgtaaaatatataacatatactctatgatagagtgtaatatattttttatatatattttaacatttataaaatgatagaattaagaattgagtcctaatctgttttattaggtgctttttgtagtgtctggtctttctaaagtgtctaaatgatttttccttttgacttattaatggggaagagcctgtatattaacaattaagagtgcagcattccatacgtcaaacaacaaacattttaattcaagcattaacctataacaagtaagttttttttttttttttgagaaagggaggttgtttatttgcctgaaatgactcaaaaatatttttgaaacatagtgtacttatttaaataacatctttattgtttcattcttttaaaaaatatctacttaattacacagttgaaggaaatcgtagattatatggaacttatttcttaatatattacagtttgttataataacattctggggatcaggccaggaaactgtgtcatagataaagctttgaaataatgagatccttatgtttactagaaattttggattgagatctatgaggtctgtgacatattgcgaagttcaaggaaaattcgtaggcctggaatttcatgcttctcaagctgacataaaatccctcccactctccacctcatcatatgcacacattctactcctacccacccactccaccccctgcaaaagtacaggtatatgaatgtctcaaaaccataggctcatcttctaggagcttcaatgttatttgaagatttgggcagaaaaaattaagtaatacgaaataacttatgtatgagttttaaaagtgaagtaaacatggatgtattctgaagtagaatgcaaaatttgaatgcatttttaaagataaattagaaaacttctaaaaactgtcagattgtctgggcctggtggcttatgcctgtaatcccagcactttgggagtccgaggtgggtggatcacaaggtcaggagatcgagaccatcctgccaacatggtgaaaccccgtctctactaagtatacaaaaattagctgggcgtggcagcgtgtgcctgtaatcccagctacctgggaggctgaggcaggagaatcgcttgaacccaggaggtgtaggttgcagtgagtcaagatcgcgccactgcactttagcctggtgacagagctagactccgtctcaaaaaaaaaaaaaaatatcagattgttcctacacctagtgcttctataccacactcctgttagggggcatcagtggaaatggttaaggagatgtttagtgtgtattgtctgccaagcactgtcaacactgtcatagaaacttctgtacgagtagaatgtgagcaaattatgtgttgaaatggttcctctccctgcaggtctttcagctgaaacctggcttatctctcagaagtactttccttgcacagtttctacttgtccttcacagaaaagccttgacactaataaaatatatagaagacgatacgtgagtaaaactcctacacggaagaaaaacctttgtacattgtttttttgttttgtttcctttgtacattttctatatcataatttttgcgcttcttttttttttttttttttttttttttccattatttttaggcagaagggaaaaaagccctttaaatctcttcggaacctgaagatagaccttgatttaacagcagagggcgatcttaacataataatggctctggctgagaaaattaaaccaggcctacactcttttatctttggaagacctttctacactagtgtgcaagaacgagatgttctaatgactttttaaatgtgtaacttaataagcctattccatcacaatcatgatcgctggtaaagtagctcagtggtgtggggaaacgttcccctggatcatactccagaattctgctctcagcaattgcagttaagtaagttacactacagttctcacaagagcctgtgaggggatgtcaggtgcatcattacattgggtgtctcttttcctagatttatgcttttgggatacagacctatgtttacaatataataaatattattgctatcttttaaagatataataataggatgtaaacttgaccacaactactgtttttttgaaatacatgattcatggtttacatgtgtcaaggtgaaatctgagttggcttttacagatagttgactttctatcttttggcattctttggtgtgtagaattactgtaatacttctgcaatcaactgaaaactagagcctttaaatgatttcaattccacagaaagaaagtgagcttgaacataggatgagctttagaaagaaaattgatcaagcagatgtttaattggaattgattattagatcctactttgtggatttagtccctgggattcagtctgtagaaatgtctaatagttctctatagtccttgttcctggtgaaccacagttagggtgttttgtttattttattgttcttgctattgttgatattctatgtagttgagctctgtaaaaggaaattgtattttatgttttagtaattgttgccaactttttaaattaattttcattatttttgagccaaattgaaatgtgcacctcctgtgccttttttctccttagaaaatctaattacttggaacaagttcagatttcactggtcagtcattttcatcttgttttcttcttgctaagtcttaccatgtacctgctttggcaatcattgcaactctgagattataaaatgccttagagaatatactaactaataagatctttttttcagaaacagaaaatagttccttgagtacttccttcttgcatttctgcctatgtttttgaagttgttgctgtttgcctgcaataggctataaggaatagcaggagaaattttactgaagtgctgttttcctaggtgctactttggcagagctaagttatcttttgttttcttaatgcgtttggaccattttgctggctataaaataactgattaatataattctaacacaatgttgacattgtagttacacaaacacaaataaatattttatttaaaattctggaagtaatataaaagggaaaatatatttataagaaagggataaaggtaatagagcccttctgccccccacccaccaaatttacacaacaaaatgacatgttcgaatgtgaaaggtcataatagctttcccatcatgaatcagaaagatgtggacagcttgatgttttagacaaccactgaactagatgactgttgtactgtagctcagtcatttaaaaaatatataaatactaccttgtagtgtcccatactgtgttttttacatggtagattcttatttaagtgctaactggttattttctttggctggtttattgtactgttatacagaatgtaagttgtacagtgaaataagttattaaagcatgtgtaaacattgttatatatcttttctcctaaatggagaattttgaataaaatatatttgaaatttt

SEQ ID NO: 14 - DNA, 27321 bp, Homo sapiens
  source 1..27321: mol_type = other DNA
aaaatttcaaatatattttattcaaaattctccatttaggagaaaagatatataacaatgtttacacatgctttaataacttatttcactgtacaacttacattctgtataacagtacaataaaccagccaaagaaaataaccagttagcacttaaataagaatctaccatgtaaaaaacacagtatgggacactacaaggtagtatttatatattttttaaatgactgagctacagtacaacagtcatctagttcagtggttgtctaaaacatcaagctgtccacatctttctgattcatgatgggaaagctattatgacctttcacattcgaacatgtcattttgttgtgtaaatttggtgggtggggggcagaagggctctattacctttatccctttcttataaatatattttcccttttatattacttccagaattttaaataaaatatttatttgtgtttgtgtaactacaatgtcaacattgtgttagaattatattaatcagttattttatagccagcaaaatggtccaaacgcattaagaaaacaaaagataacttagctctgccaaagtagcacctaggaaaacagcacttcagtaaaatttctcctgctattccttatagcctattgcaggcaaacagcaacaacttcaaaaacataggcagaaatgcaagaaggaagtactcaaggaactattttctgtttctgaaaaaaagatcttattagttagtatattctctaaggcattttataatctcagagttgcaatgattgccaaagcaggtacatggtaagacttagcaagaagaaaacaagatgaaaatgactgaccagtgaaatctgaacttgttccaagtaattagattttctaaggagaaaaaaggcacaggaggtgcacatttcaatttggctcaaaaataatgaaaattaatttaaaaagttggcaacaattactaaaacataaaatacaatttccttttacagagctcaactacatagaatatcaacaatagcaagaacaataaaataaacaaaacaccctaactgtggttcaccaggaacaaggactatagagaactattagacatttctacagactgaatcccagggactaaatccacaaagtaggatctaataatcaattccaattaaacatctgcttgatcaattttctttctaaagctcatcctatgttcaagctcactttctttctgtggaattgaaatcatttaaaggctctagttttcagttgattgcagaagtattacagtaattctacacaccaaagaatgccaaaagatagaaagtcaactatctgtaaaagccaactcagatttcaccttgacacatgtaaaccatgaatcatgtatttcaaaaaaacagtagttgtggtcaagtttacatcctattattatatctttaaaagatagcaataatatttattatattgtaaacataggtctgtatcccaaaagcataaatctaggaaaagagacacccaatgtaatgatgcacctgacatcccctcacaggctcttgtgagaactgtagtgtaacttacttaactgcaattgctgagagcagaattctggagtatgatccaggggaacgtttccccacaccactgagctactttaccagcgatcatgattgtgatggaataggcttattaagttacacatttaaaaagtcattagaacatctcgttcttgcacactagtgtagaaaggtcttccaaagataaaagagtgtaggcctggtttaattttctcagccagagccattattatgttaagatcgccctctgctgttaaatcaaggtctatcttcaggttccgaagagatttaaagggcttttttcccttctgcctaaaaataatggaaaaaaaaaaaaaaaaaaaaaaaaaagaagcgcaaaaattatgatatagaaaatgtacaaaggaaacaaaacaaaaaaacaatgtacaaaggtttttcttccgtgtaggagttttactcacgtatcgtcttctatatattttattagtgtcaaggcttttctgtgaaggacaagtagaaactgtgcaaggaaagtacttctgagagataagccaggtttcagctgaaagacctgcagggagaggaaccatttcaacacataatttgctcacattctactcgtacagaagtttctatgacagtgttgacagtgcttggcagacaatacacactaaacatctccttaaccatttccactgatgccccctaacaggagtgtggtatagaagcactaggtgtaggaacaatctgatatttttttttttttttgagacggagtctagctctgtcaccaggctaaagtgcagtggcgcgatcttgactcactgcaacctacacctcctgggttcaagcgattctcctgcctcagcctcccaggtagctgggattacaggcacacgctgccacgcccagctaatttttgtatacttagtagagacggggtttcaccatgttggcaggatggtctcgatctcctgaccttgtgatccacccacctcggactcccaaagtgctgggattacaggcataagccaccaggcccagacaatctgacagtttttagaagttttctaatttatctttaaaaatgcattcaaattttgcattctacttcagaatacatccatgtttacttcacttttaaaactcatacataagttatttcgtattacttaattttttctgcccaaatcttcaaataacattgaagctcctagaagatgagcctatggttttgagacattcatatacctgtacttttgcagggggtggagtgggtgggtaggagtagaatgtgtgcatatgatgaggtggagagtgggagggattttatgtcagcttgagaagcatgaaattccaggcctacgaattttccttgaacttcgcaatatgtcacagacctcatagatctcaatccaaaatttctagtaaacataaggatctcattatttcaaagctttatctatgacacagtttcctggcctgatccccagaatgttattataacaaactgtaatatattaagaaataagttccatataatctacgatttccttcaactgtgtaattaagtagatattttttaaaagaatgaaacaataaagatgttatttaaataagtacactatgtttcaaaaatatttttgagtcatttcaggcaaataaacaacctccctttctcaaaaaaaaaaaaaaaacttacttgttataggttaatgcttgaattaaaatgtttgttgtttgacgtatggaatgctgcactcttaattgttaatatacaggctcttccccattaataagtcaaaaggaaaaatcatttagacactttagaaagaccagacactacaaaaagcacctaataaaacagattaggactcaattcttaattctatcattttataaatgttaaaatatatataaaaaatatattacactctatcatagagtatatgttatatattttacatatcatatataacatatactctacataacataatagggttttaagtttataacttttttttaatatataaacatatatatatcctacaatgctggtaatatgtatatatgctcgtactatatatatatacacacacaaacatatatatatacttgtactacatatatagtacaagcattgcaggatatatatatgtatatattatatctgtaaaagctaagtcagatttcactttgatacatgtaaaccaggaattctatgtttcaaaaaacagtagttgtggtcaactttatatcttattattatatctttaaaagatagcaataatatttattatattgtaaacaaaggtctgaattcccgaagcataaatctaggacaagaggcaaccaatgtaatgatgcacttgacatgccctcacagactcttctgagaactgtagtgtaactaacttaactgcaattgctgagcagaactctggggcatgatccaggggaatataaatatatagaacaggcattgtaggatatattaaaaaagaaaacatgtcatatcattcactctgacaatctcaagttcaacatttacctgatccaggaaggctttcactagagtgtctctgtgtaagacatcttgaaaaatattcctgaagaaaagaagaaaatgaagaaaagaaaaaagttcaaatgttgaaatggccatataatgctaccttccacaatccctcacttgagccaacattttaagttcttataaattgatattacatataaacacatttgtaagaatatagatatatatatttggagacacaaaatatacattcatttatttactcaaggatatatttacattttactggtgtttgtcaggctaatatgtaattttttctctaaagaatataagcagtccccagtaagggtatgtatgtatctatcaatctattttactactctcatcttttaaaaaaagtagagacccttaggcaattaataaataaaactaccaattcttgccatctcaaaaaaaaacaaaaaacaaaccagcaacaaaaataagccactaccatcaaaaaccaaaacaaaccaaaaaatgtgaagaaaaatttgagtgagattagagaacacactccgatgattatccactgggtttgcctcaacaagcccaccatctgtaagtaacatgaaccaactatccaagaaagtactacctaccttggcaacgaccagagtgagtagtagtaatataatggccacttaaaataatgtgtgcctaacacagcacctaggatatagcaggtgctaaagcaaacacacaaacaaacaggactacttattcccttcccaggccccacctccctttcatctttttctcttccattttccctaggttctactcaggccagagggtaagagaacatttagtaagaggaggagtttttaactgaaagtggtagggatcatcctatacctgaccagagtggcaaaaaaagagaatgggtatgtgtagaagcaaacaggaaggtagttcaagtttccttatcttaagaaacgagtgtaccacactacagaagaaagaaaccgtaaaggggaaaaatattagcatttcgtcattattgactgggcactgatagtgccccttcttgggctctggaaagagaataaggcttatatttaatcgagtggacttattatacctgttccactgaatgagtatcttcatcataagtgaattagataaagcaaggtgttaaaaaagaacatttccatttgtttgtgtcatctctgatttctttcagcagtgttttgtaattctcatagagatctttcacctccctggttagctggattcctaggtattttattcgttttgcggctattgtgaatgggactgtgttcttgattttgctctcactttggaaggtgttggagtatagagaatgccaaaactttgctgaaatttttaacagatttaggagtttctgggcagagactatgagattttctaggtacagaattatactgcctgcaaacagaaatagtttgacttcttctcttcctatctgaatgtctttctttctttctctttcctgattgctctggctaggacttccagaactatgctgaaaaggagtggtgagagtggacatccttgtcttgttacggttctcaaggagaatacttccagcttttgcccatttggtaagatattggctatgggtctgtcatagatggttcttatttttttgaggcatgttccttcaatgcctagtttgtttaggattgtttgtgatttttcttttttgagacagggtctcactccgttgcccaggctggagtgcggtggcatgatctcagctcgctgccaacctctgcctcccgggctcaaacaatcctcccacctcaacctcctgaatagctgggactataggtgcatgtcaccataccaagctaatttttttttttttttttttttgtagagatggggtttcaccatgctgcctaggctcgtcttgaactcctgggcttaagagatatgcccgccttggcctcccaaagtgctgggattacaggtgtgagtcactacacctgacctactgaaggtttttaacatggaggatgttaaattttattgacaaccttttctctacctattgagataatcttgtggtttttgtttttagctctgtttatgtgatgaatcacacttattgatttgtgtatgttgaaccaaccttgcatcccagggataaagcctacttgatcaaagtagatcagctttttgatgtgctgctggatttggtttgctagtattttgttgaggatttttgcatctatattcatcaaggatattggcctgaagttttcttttttctgttgtgtctctgccaggttttggtatcagaatgatgctggcctcattagggaagagttcctcctcctcaattttttggaacagattgagtaggaataataccagcttttctttatacatcaggtataaagagatgacacaaacacatggaaaaacattccatattcatagataggaagaattaatattgttaaaatggccatactgcccaaagcaatctacagattcaatgctattcctataaactaccaatgatatccttcacaaaaccagaaaaaactgttttaaaattaatatggacccaaaaaggagcccaaatagccaaagcaatcctaagcaaaaagaacaaagctggaggcatcacattagccgattttatactaaaaggctataggaacctgaacagcagggtactgttataaaaacagacacatagaccaatggagaatagagagccaagaaataaagccacacacttacaaccatctgatcttcaacaaagttgacaaaaaacaagcaatggggaaaggactccgtattcaataaatggtgctgggataattgctagccataggaattggagtgaaactggaccccttccttgtgccatatacaaaaatcaactcaagatggattaaagacataaacgtaaaatctaaaattgtaaaaaccctggaagacaacctaggaaataccattctggacataggccctggcacagattttatgatgaagacgccaaaagcaactgcaacaaaaacaaacacaaatgggacctaacgagctcctgcatggcaaaagaaactatcaacagagtaaaagacaacctacacaatgggagaaaaatatctgcaaaccatgtatccaacaaagggatatgcagaatctggaaggaacttaaaactaattaacaagcaaaaaacaacccaccccactacaaactgggcaaaggacatgaaaatttttcagaagaatatatacagacagctaaaaagcatatgaaaaaatgcttaatatcactaatagagaattgcaaatcaattctctaggaatggctattattaaaaagtcaaaaaatcacagatgttggcaaggttgtggagaaaagggaacacttatacactgctggcgggactgtaaattagtttagctattatgaaaagcagtttgaagatttctcaaataactgaaaatagaactaccattcaccctagcaaccccattattctatatgtacctaaaggaatacaaatttttctaccataaagacacatgcatgtgtatgttcatcacagcactattcatgataacaaagacagggaatcaacctaaatgcctatcaatggtagactggataaagaaaatgtgatacatatacaccatggaatactatgcagccataaaaaccagatggagctagaggtcattatcctaagtgaactaatccaggaacagaaaaccaactaccgcatgttctcacttctaagtgggagctaaacactgagtatacatggacacaaagaaggaaacagcaacaccagggcctacttgagggtgggagaagggtgaggatcaaaaaactacctattgggtactatgcttattacctgggtaatgaaatcacctgtacaccaaaccctcatgacacgcaatttacctgtataacacacctgcacatgtacacatgaacctaaaataaaagtcaaaaaaaaaattccagtgaccaatttttcatgtattggcagtgactggaattattttaaaaagttaaaattaaaaataacaaacataattaacatgtaaaaacatatacttaaaagtaaaatgactctgtgacaatagacttaacacacaatctagtggctgaaaatactattttttggacaattttatgtttagaaaatttagagctggatgcaaaatttaaaaattcaggatattattttgtcatgatcagcaaaatgagaatagctgtctaactgtagtttgtcaaatcagcaaaacaaacatagctggctaaaaatgattaagaaatgttaaaatacacatacatcctctaaaaaacaaaacaaaaataccaaatggttgcaaacccattctgcagttcactaaatttcctcaaaaaagctcccaagtaaccaatcaaaaaacggaaaaaatactaagcactttaggaaaaaagaaaatgtttcaaggcacagattaattagaaaacttctacatgtctactaaaatttaccaatatataaaaacttactgacatgtaatttcagttggaccaattcattttctaaaacattcccctactactttctcaagaaccaataaaaactctggagaactaggaaaaaatgggtcctatattaagtcatctttctgcaccttgagatgtataaggctgggggtcccttgaacaagatattcctattctatgcttttggttaacacttactgtgtaattactggtgctccacaggtctgttacctaagctcaaactgattctgtagatacataggtcaggcttatttgccccaatttttctattgccttacacacttagacctgggttattacagttaacacttactgttaccttctatgtgccaggcattattgcaagcatttttttttttttttttttaaataagacagagtctcggtgttccccaggctggagtacactggcacatcataactccctgtaacctcaaactcctgggctcaaaagatcctcctgcctcagctttcggaatagctaggattacaggcacacagaaacacattccaataattcttttttattttttgtagagatggggtttcactatgttgcccaggctggtctggaactcctggcctcaagtgatccgcctgccttgcactcccaaagctctgttcttacaggcatgagctactgtgccttttttcaactgataaaagagaaacacaaaagtatactataattcttttcctgatttcagaacatcttttaagtgtttacttagggttttaggattatagatttatcatcatcattttttttttcaagttgggtccatgctcaacaattaattatcattacttttccttttgaatttactgttcaggcttttttttttaaaaaaaaataagaagtgaataacaatataaaatgcaaagtaaaaaaatgttccattaatatattttaacagttttgctgtattttatattcatatgtcaagaaaaaaaagacttagaattacttctttggttttgttaataagtccattcaataactgttacataatagactatacacaatgtaggggctggggctggggctgtctggttggccactattaagcccggtacctagaacagtgcctaggagctcaatatatatttattaaacaaatagttaaatatttactttaagggttaatcttacctattttagggtaaacacaattgtatggaaaaagaagaacatttaagaaaaaaatgcttgattaaatgtttcttcaagcataattctgctggtaatatttctttctttttaaatgcaacttctgttttgtttttattcgtaaaagacacaatttcatattgcttgactacagtaccagcaggcagagcattacgtacaaatcaggagtaaagctttcgtcagtgtagatgatcgtatcctgagccatgtcttcttctgaagtggctctccagaaggctgtcagctcggatctcatgtatctacgctgattataaatatgttcatgacagggtggcatctgcttcacagtattgacatccacatctatgtgtgtggtgggatatggagcatacatgacttgccggaaaggcagcacaaagcttccagttgaatcctgtcaaaataaaaggaaaatttactgtcttacatgccaaacgatatgaataattgttttttaattttaaaaaatggtctctgatttagcaaatccatctctaaaaatttatcctaagaagctattcatgagtgtgtgcaaagttttagtgacagaagtgttcagtatagcattggtttcaatagcaaaacatcagaatgacctaagcatccaaaggaagtggttaagtaaataaaaatgaatttattatttggcatctatagatgaagttgttgaagtttgtgttgatattcaaagaggcttagaatctgctgtgaaaaaagcagattagaacatgcagagatgatccagtgggggtgggagtcttaaagaaaatacatgcaaaagggaaaaaaagactagaaagagatataccaaatattaacagtgggtattcactggattcaaaattacaagtgtcttttaatttcttaattattctatgcacctcaatgagtatgtatttttataaaacaaatttacttctttcctaatcagttggggtagccagttaccatgtaataataacctactgcgtatgaggcactgtgctatgaacagaacagaagaaagaggctatttccatttttttactattataatgctgtgataatcatctttgtataatgtcaaaggtattttctggaaaactatatgatttgtatttgcatggagaactattaaatattttttcattagatcatagttttgaaatttcctctaggcatctggtataggtccctttcagaactaaaattatataattaaatgagagggtgctgaggaaacaaaagtattaagcactttattatgcctttaacaggagaagttctaatttacagatatgtataactcaaatagaaactacgtttcctttaactagtttctatatttaaatactatcattctgagttcatagcagcacattattgaaaatgcacaaaagcctaatataacttgtatttgcaacaatttttaaatttttttatttcattttgccgtggctacatcctcaagaaagtagtcactatgagacaatcacataaccattaggaaagctatttcttcacgtcttgggactataattgaaataacaataatagattcaacaaggtgaacaactttcttccctttaagtattataaataattgctaatttacatttctctgttttgctccttgacagtagactcaaataaaagaaaaatacaatttttttctaatatatattatatatagaaatatatatattttagtacacatacataggaattgcttaaatcctataagcttcttaaagatgtttaaaattttttttcaataaaattcaaatctatttagttaaaaagaaatgatcttatttttgatgtgcaacctgatttaagcatgtgttaaaaaaaaaaaagtcctgaggctagacatgtaggaacagggacccacctggaacacaaagggtattctatggtgtttcactgatgatactaactataaatccataagacatatagtctatgtgcagaactgtgtaaaggaagtcagtctctgggcatgtcaatatgagatacattaaatgctaatatttaagatttgtctataaagagtctcaaaaatgattttagaaaagtggtttcacttgtgataactagaaactatacctttagcaggccttgtacaaagagccctgactcatatttaaatgatgattctgcttcacataacctggagcattttctctctgctggagtcagaaaaaggcataatgttctgactatctataaaagaaaatattttagcattaaaacatgaagtaaaaagaccactgatttgcttatgaaagatatctgaaattttaattgttattatcaataaaacatatcctaagaaataagtattctttagtcacctggaatccatgggatgtaacagttgttgcttaaaatagggattctgtggtcaaataaatttagaaaatgcttggtaaatttactgtatggcatctcaaaacctttaacatttggctacatactgtgactcttcaggtgaattatatcatctgcagactttctcagacttatttgaccatgcaacttttatagcttctgtttagtgggtctacacatgaaattcgttgtaagaaatatcaaagaatgtccagatcctccaaaaagaagagaattaattattgaatttgatttaaaataagcaggtcattgggtgggatttagaaatctgattctaataatatttgacctacagctctattaggaaaaataaaaaggcatgtaactatcttgaaattcaaaccatatccacagttattatgttaaaggagtggttttcaacctagagtggtggcaacttctttctcaaattaaaacaagataaaaggtaagctattctccctcaagaggatggaggatgggaaaaatgtttaaaaaaaaaaaaaaaaacactccaactatggagcctttctcccttcataaagcagctcggcagtcactctgtgcaacctaaggctttggagatcacagatggaaagccacctgtttgaggtaacagaaggaataaggtcactagttcgtagatgcaatataatgacacaggtatactaagctctcataaatggttatatgagaaatataaattaaggctcatgtaaatatacaaagtagctgattacaaaaaaaaattatgaatatctttgtaaagtatcatttccaacatatttcctatgtaaaactttttttaaaaaattaggtttgctgaaattgaaagatacacatacttatctctgaactctttctaactaatggtcagtgaagaaaagtgcaaaatcctttagtttattagctaatgcttggaaatgtaactgttcattaatccttaattaactcaagtagcactgaaggaaagggtcagaaacattactgaataaagtataataatcaatgaccacttaatcccaatagctccctagaagggacagatttagaaggaaagcgaagacaatgaaatcaagatgaataaacaaataacatttctttggaactactaccaaaagtacatgactatcttcagatttgttaaagataacattgggaaatagaagagtaattttttttatatatctgattttaatatattctcaaaaccatttatacactactgacactggtatttccgagctatcaaaataaactgataaatgattcttactcagtttatttcaaactcactgttgccacaaggtgtcttagcaatttgatgagattacattgcctccttatactactagatcattttaattgcaacctaccatttaaatgacaatccatgatatatcatcagtcttaaagagtcaaatcatttgctagattataaaataaactaccttatttactttctctgcactgctacctactacaacggaacagccacaggtttgcaagtgtgagctgatggcactgtaagttaaagaaaacagattaaaaacattgcctataaaacaatttaacaaactaaaaacaaaaaaaagtaggtgagctcttcaaataactcagaatagctttatatgataaacaccgaagctataagcacaatgttatcttttatttgtataggaacctacattttctagagacctttcacagaaattttcttattgagccttaaaacagcccaattagtcagtataatatcatttaattaatgtatttatttattgaaataccatcattttatagctgaagaaattgacatgtagagagattaagtgacttacttaaagtcaaatgggatttaaaatgatgtatgaaaggctgacactgaacagatacaggactaaagtgcttctgattcaagccattaaggctcttaggttaaacacactcatgcctctgatactccatcatgagcctaaaggaaaagactgtgaacataaaagtgaatactttatacttttacttctcttttattaaaagtaaaatttcatgaaaatctgtaactgtgaagaaactttaaaacagaatataagataatacatgtaaagcaactagtaaaggaactaacatgtaggcactcaacaaatactggctatttctagaagaaatgtaaataggaaatgttagctatgagctattattaagtgtttttatgttccaggcactgttctaagtgctttatattatttatcttactcaatgcttataacaaccctacacattaggtactattactattattgccattttacagatgaggaaataggtgtatagagaattcaggcaccttgcccacgggtacacagcattaatccagggagtctggtttaagggcacaaactcttaagtactaaactccactgctggatggaaaaagatcagtataaatatgaataattttgttctacgcctaaataacttaagttcatctacagtacaacttaatatgaaaggattctgttagctttaatgagaagtaaaacaagaaaccagaatcaagcaaggggccatgatttcttgtctgggatggaaactcggtttctttaaatagcaaatggaataacaccaaatatatatagaaatataatgagtgaaaaataacacaaatttaagcaacagttcaaatacgtaatgtccctagaacaatctaagtagacagtctgttattttctttcttccaaatcttgtcataggtgagcataagatggtatctgcttcatccagcttttatgaaaagaaaaattcttacttgagaagaaagccttcatgacagctgtcaccaatatcatcatcattgagtactgtatcagctatctaaaatgcatcaaaaaataaaaaaattagtctggctgtaacatagtgttgaaataacacttttaatatacaagttttcggaagtctggattcaatataacacactgccttcatttccgagaatcaagactccccaaaaaacaatctctgtgcactaccataaacttcagaagaacaaatgtgaaagctggtcaagcaggttaaacaatttttacaagaacaacttcctcttctgagctgtcagaatcaggagactaacctaaatgacaaaatcagaaaacaacaagaatagtttcctaaaggtatctcttaacactcatagtgtgtgattcaaaacgtcctcaacaaatgattaaggaaactaaatttgtgactacaagtaaacttccattaatggttactactttggcacacagttttgtttcaaaagacactacattaaatattaattgctcctataagagctgggatcctcccacttttaggaattataaaagtaatgaaataaacaaaatgaatttaattttgtcatcactgatcaaaaatgcctctgttttgccataaaatccaggattttgtgtgtgcttatttgctaaagtggctaatactgtatgtgaatagtatgtatgacaaagtccttactattaaaattagaatattaataatatacataataatactataaccccaaaaaactcataaagtgtataattgctctcatttaaacttacatctatttcttcaggaacactgtgtgatttcatagatgaaagcagttccattacaggaatcacttctccagtaagcattggaataatactctgaccctgcacaataaagtgacatgaagtgaagaaaatcacgtaatatgagagaagctgggcaataaaaaataaaaataacatcaaacaataacattctttgatgaaaatacttcgtaatttgttcaaacacagtatcaaacaagtctactacatgtctaaaggatttatatgcaatccaaagctcacttttattctttcttttctttttttttttttgagatggagttttgctttcattgctcaggctggagtgcaatggcgtgatctcagctcactgcaacctctcctcccaggttcaagtgactctcctgtctcatcctcccaagtagctgggactataggtgccgccaccatgcccggctgatttttgtatttttagtagagacggggtttcgccatgttggccaggttggtgtcaaatttctgaccatgcccggccctaaagctcacttttattctttagagagtatggaatcattggtttatcgtttactgttacatgcaatgattaagtcatcatgcctcttttagaaaagatctcctttaaaatttgagataaaaaaaatttgttaaaggtcatcaatatatttcatatttaaaaatgaggaaaaccaagcacaaaaagactttgaaatccttaccaaataggtaaggaaaacttgaatcaatacctaacctccatactcataaaagtataatctacccaaatgcaaatcaaaatcagcacatatattttaagaatcaataaaacagaaaaattccctttagagctatttcaagatattactacttattacatcttgaaattgtaattttgaaatttgtagtctatagaatcaaactgaaaattcagtataacacatcacaaatgtaaagtgtctcaaatatggatggtccctcatttattcactaccaccaccagtctcatcagttttgtgaccaacttggttaagtaaattttttgagatataaatgaaattgtcaaatgactatgcatttttagctaaacatattttttaaatcatacattatttaagatgaatttaatactagttgtttttcctcacttattttatgaaatgattttactcaaagtcttcataagcatctttaagttagaatctttgtcagacccagggccatttttggagtaaccttaaccagtttttcagagccccatattattaagttgcttgagaatttaaatgtgatgctacttctggaagttttatcctaagccatatgcccatttgcataatgctgaaagttttatttaaaaaaaaaccatcctttagtaacctccacaactaactattcactgtttttagtttttaaagtaataattatcatgcctgtttacaattacaattcacacattcaatctaacaagaataatgactagatccgtgttaaatttccttccctgtgaagcaattttatcagatgacagctacaactgaagttgtttcaaactaatgcatcatccccaaacagtattgttcaaaataaagtcgttgtgagatttgcaagaactcaatcaaaaggcaactcctccttttcgggaagaataattttgggaaaatatttcctcttaggtttaagcatacatagtatttcattcacagtatctcagacattatcagtataagtgaatgaatagcctcactgaagctcaacaacaccaaaaaaaaaaaaaaaaaaaaaaatcctacagggctaaatacagaagaggctctaaaagaaaatctcttaagtttctattcctccttgtacttcccaaacttgaacttctcagcagtaagataacatttttaagaagagcacttaaaagagagaccaaaattcattaatagtagtcaacttaagtaaaggtttctggtttgaaaaaacaaaatcccagtaaaagcagaattttagttggttctaagtttcctcaacttgcgataagtttacttaattagtctactaataactagtgggttagagggtgctgaaagttaccccattcctggggaccctgcttattgaccagcaaataaggactgggattctttgggtaaagggaaatcttttcttgttaagtcagacctttacacagaataactgtctctgaattggaaagctatctacaaaagtacaaacataacaatttggtaaaggagatcattgtattgggttctgtattatggccatgtattttcacaagtttttttttttaattacttttttaaagtatcatctgtctcattcatgctaaaaagaagcaaagaaaggcaaaacagccatgtttaaaatattggagttttacaaggagcattgagggtcacccacaagaggaaatggaagtaaaagtgaagaactctttcttcactggagattctccttcaaaagaacttctctgctttacagtgaaatagtctgtacttagtttccgcaggggaagccacacccttgtaaccatgcttctcaaactcttagtgtctgttcctgaggggcattcaaagccaagggataaacatggcacattttcctagaggagagggtaagaaatatcactgacaaattttaatactaaaatagttatggaataaaatgtaaattgcatgagtcttaacgatacaacataagacttagaagaaatattgtgtggacctgggcctacaccccagacagatacctcaggggtacatatgctctccttctgttacagctacttctagggaaaggttcgagaagtagtaccttaaagaacatatcagagacaattttttttatttttactatgaacaagttatccaaaatttattctgggcaaacagaaaaaaaaagggagcaaatattaatttgtagatgcaattactattttcctttgtttactgatttaactctttgggtttaagatatggaaatcttcctccagtttattctgtacacctccataaaagctccattaaaggcttattcgtatgtctccaaggccttgacaaatgtagccatcaaccttatacagatacatgctgtgagaaaaacatttgacagtatgcaatttgcatatacctgatcttccattctctctgtgccttctaagataatcttctggacattttcttgtctttcctgagcaagagaaaatttatttaaaaaaacaacccacaacattttgatacttgcttatttttcaatagacatgttcttgtgtagtaatttagttcacaagaaaaatactttctactttagggaaaaaatgggggcaggggtaggaaattaacccaacaaatgcatgttctcataaacaatacaaaataaaatcaaaacaacctttattctgcagtgaaaaaaagataacttcacagaaaacagtcaatgtaacatctgcatagtttcaaaaaggaaaagaatgacttgcacttttcaaattaaacattatgatgttgtttaaaagattctcctgattttaagagtttcataatgtgagaaaaaaggaagtaagcctgcaaacatagtaaaaaattattcttttaaaagatattatttttccttactattgggcaaaagccttttaaaactggtaatgcttaatggactttcaggttagtatcaaactggaacacaggaaggagaattcaatgtgttctttagatacatcaaaactatactgaaatgtaaatagcattatatattcaactacaggatttaggaaaacaataatttctgtaagattaaaaggaattctcttgggaaccattccattcaacctcctcattttatgaacctgggaacttggcaaagaggttaaagagaccaaaggctacatgaccaacagcttatgaaactattactttgaactgttatacttacacatagtagtaagcaaaagacagaattgtgcaatgaaagggaaacaaaaggtattagagtcaaaggctcccaagaagaatccagggtctaaaagtttctttatttgtctaagctttagcttttcatctataatgtggagctaccatttcgtaccttccacagttaatatgaagatgacaggtatcagaccagatgtatttgtatctaatagggtaaatgcaaaataaataacatttattgtttgatgttcactgcatataattaaaaaaataagatttatatgtaccagaaaataagctttcaacagataggttaacatgattaataagctgaaaaatcacttaccttatgcatccatattcttcctttccggattatatgtgttaatctatcaacacacactctatgaagtgggaggtagaaactaagttctgtctgtggaagtataattgatagtccatatgtgctgcgatccccattccagtttccatcaaagattaatgaaacaataatcactcccttttcagacaagacaaaaaactttacatctatagcaccactctctgcatttcgaaggatttctccatttagagtgtggttggcaagaaaagttatttctccatcactgagaagtacctgttctgtctttggagcccaaatgtgccttactctaggaccaagaatattgtcccagtaagcaaaagtagctgctaataaaggtgatttgccacttaaagcaatctctgtcttggcaacagctggagatggcggtgggcaaagagtcgacatcactgcattccaactgtcacattatccaaatgctccggagatatctaaacaatgacatatgaaaccaatgattaggttcagcaatttaaagatatccatcaaaaccccaaatgatttagacatatttggtttgtcctcttaagtcaaagatgtggaatcctgttatctcctatcaggataaagacattcaactagcacagtaggtgcacattaaatgtttgttgatatgatcattttacaagacatggtaacttgttacttatattcagggcatacatttagaaattcaaagaaataacttaaaaaagggcttctttacactgatattaaatgttacatactaaagctcatagaatagacccgcagtattcccaaatatccagtccatgtgcaattctagtatgactggagatttggcccctaacccatagcaactaaaaaggagaaaaacaggaagggaaaggctcagctagagactgacacttgtgggttgaattgtgtcccccaaaaagatatgttcaattcctaacccttggtgtacgtgaatgtgaccttatctagaaataagtgtaatcatgttaaaatggggtcatactggattagagtggggcctaatccaataactgctgtgtttataaggagagagatttggagacacagagacaaatggtagacagccatgtgaagacaaaaggcagatactggattgttgaaactacaaggcaagaaaggaacactcaggattgctggtaaccaccagaagccaggaagaggcaaggaaagagtcttctctcttgaagatcatgcccctgtcaacactttgatttcggacttctagcttctagaattgtgagagaataaattgctgttgtttaaagccactcagtttgtggtgctttgttaagtaatcttagaaaagtaatacaacacctaacaacagaaatactttaaagccgctaaaaggtcaaaaaaaaaaaaaaaaaaaaagacatggaaataccacaagtctggagccataacaaaaaatgggcaaacagtcctgtatcctcagtgaactctctggttatgagaatactgaagcccgatcctgatgtttaaaacgacattgaagtatcaagacaaagataaaaatatttaatatgctagccaagaaaccaatacagcatttcatcactgcaaagagagttctacactaaatggctagaatttaaaagctttagttatttagaacacgtagaaaacagaagggctaaatagggcccgttcaagcctttgaatttaatgagaaaacagacatgaggagaagaacataaacgctcacatccaagacagaacccagggctcttggtccccttgctcaacttgtacatcttaatccacataaacataccactctaaaaaggtacatcctatgtgatattaatgtaaaacaaatcattcttgcaaatacagttatgtgccatgtaacgtttcagtcaatggtagactgcatatatgatggtagtcccattagattacaatggacctgaaaatatgctattgccttagtgacactgtaaccatcataaggtcttagtactattttgcaagttatttaaagtatagcacatacaattattacagtgtacaacacttgataataaactactacattgctggtttatgtattcactatactatgccttttattgttattttagagtgcactccttctactttttttttttttaagttaaatgtaaaacagcctcaggcaagtccttcaggaggtattcaacagaaagcactgttatcataggtgacagctacatgtgtgttattgcccctaaaaaccttccagtgggacaagatgtggaggtggaaggcagtgaggtggaagggagtgatactgatgatcctaatcctgtctatgcctaggtgaaagtgtgtgtgttttagtttttaacaaaaacgactaacaagtaaaaaaaaaaatttaaaatagaaaatagaaaaaagcttctagaataaggatacaaagaaaaaatatttttgtatagctatacaatgtatttgtgtttcaagctaagtattttaaaagttaaaaaattaaaaagtttacaaagttaaaaagttataattttttattgaagaaaaactgttaagataaatttggtgtagcttcagcgtactgtgtttatagtctacagtggtgtacagtgttctaggccttcacattaattcaccactcactcactgactcacccagagcaacttctagtcctgcaagctccattcgtggtaagtggcctacacaggtataccattatcttttataccatacttttactgtaccttttctctgtttgcatatatttagataaatatttaccactgtgttacaactgtctatagtattcagtacagtaacagttgtacaggtttgtggcctaggagcaacagactataccatacggcctaggtacataaaggctatactatctaggtttgtgtaagtacactctatgatgtttgcataatgacaaaatcgcctaatgatgcattcctaagcaatgtgtgattgtactataattgaagacttgttatctaagactgaaagtaaaaagaattgcaatttcacctaagcaagtctaaaactgtgaagtctatttataataatagcaatacaaagcagctaataggcaaactatgatatacctatctttgccatatgattgctttgggagctaacatttgatctgtaaatgtatgacaaagtaaacaattttacttaaagaatttcatccacatcttgtcaagagagttcagtctgatggaaagcactgacttctatttacagagcattagatgagtgcttttatcatattatgagtaggcatacagagcctggcaaaacagttaactctaagtatgtacagaaatggttgaacacaacgacagttttaacacgtgtatttgtaatttcaaaaattcatttaggtaatatttacttttaaatatgttgtatcaatttaatagtcttaagagacagcactagatataagccgtacagcttctttaaaatatccactgtttttaatacaatgtaagcagtcagtttacaatgatcaaatataggaatgtaatctgaattgaaatggtaatgacactactgctgtcataactaacaacagcaaactggaggccaacataatgaattaagttaacatacaaccataaaattatattgcaaacatatttttctttcattcttttaggttaaaaaggtggataatcataaaggcaatattacaactctaatatttcatcattaaactgaaaataaaagtatttcctaaaacagaactgaaccctggagcaaaatctgattgaattatagggaaacttttaccacgttgtgaaaattgaactattatactgctagttacactctcactcctaacagaataagaaaaaaaaaatgggccgggcatggtgggtcacacctgttatcccagctctttggtaggccgaggcaggtggatcacctgaggtcaggagctcaagaccagcctggccaacatggtgaaaccccacctctactaaaaatacaaaaaattagccgggtgtggtggtggacacctgtaatcccagctactcgggaggctgaggcaggagaatctcttgaacccggaggtggcagaggttgcaatgagctgagatggcgccactgcactccagcctgggcgacagagagagactctgcctcaagaaaaaaacaaacaaacaaacaaacaaaaagaataagaaagaaaatgaaggacaaagatcatactgaattgcttagttttaaatcctaccaaaagaaatagcctgggaaatgaaatgtcacagagaagtataatcaggagagctgtacaattattttactaatacttgaagtcatcgtctttggtgagaaaaatccatacatgcaaatgcagctgaaaaaaatcagctcaaaaccaatagttgtttatgtacctatcttacgtacatgtagtgctgtctactccagagagttaccaaacattagccagtcttttgagggaagccaagattcaaattgagtgagacggtggcttgctcacagggttcatgagaggtttcccaatacactttctggaaataatcccatacatgcagacatgattacattaattaacatctgctaaaactgttagtagagtgctaagtttgaggttttgctttttctttaaacgtctgttaaaaaatcaaccatctcttccctgattggtatttagaaaggtggttggtccactgctattgtagtgaaaattctacaatcataaagccctcacttcttgttttttagagacagggtctcgttttgtcatccaggctggaatgcactggcaggatcatagctctcggtaacttcaaactcttgggctcaaatgaccctcctgcctcagcctcccaagtagctaggactacaggtgcacatcaccacgcccggctaagtttttaattttttgtagagacagggtctacgttgcccaggttgagcttgaactcctggcttcaagtgatcctcttgcctccgcctcccaaagctctggcattacaggtgtaagccaccttctccaacctggctctcaatacttgtaaccatgctgtttattttctcccagcccaaagagaagcaggatcctaaaccgtccactttccacaacaggagctgcccaggaccacttcaaggacagtgaactgtttacagtaccagaaagttcacaacactttctcaatcttcaacatcagggaagactggaaggtgaagttcatatcactatctggccatttctcacagttccaagtttctcagacaataggtaggctaacctagtcctcctgggaactatctaattaacgtagaatagaacccgagggcagacttgaaaaacagaagtcctccttggtttactttgtttctctgaaagcaaattgtggagtgccaacatagccaaacaaaatattttatcaacttcataaggtgcttgtaattttttcctggagcaggtaaatgctggcttagtgaacaatctggaatgtggtaattactctcgttcttgtttcagatgtactatcagcatgtagcagtttccaactgattcagggttttcctaaagtggcaggccttggcagaggtggtgacaacaatgcccgtgtcaaatgacaccgtatttcaagtattctgactccaggttattaatatcccctatatgatagtcttgtttctgtgatattcacagattatgttaaaagtttcccaaagtctgagaaaaatcatatcttaacagtatcttttttttttttgatcctttgtacaaaagtagaagtaatgccagacagattacgtacccttgttgtgaacaactggtgcatggcaactgtttgaatagaaatttaccaactgccacaaccaggcaactactctcccagagcctaacaatctcgattgcatctgaaagggccacccctcctgggaaagtgcaggacctccctcctgtttctgaatacaaagcctggtggtgttcaacgcggccagatagacccaatgagcacacggacatgtaatctgtgcacttctttagacaactgattaccatcagtcaagtgatgcccaagtcacaatagtcacttcctttaagcaagtctgtgtcatctcggagctgtgaagcaaccaggtcatgtcccacagaatggggagcacaccgacttgcattgctgccctcatatgcaagtcatcaccactctctagaagcttgggctgaaattgtgcaggcgtctccacacccccatctcatcccgcatgatctcctcgccggcagggaccgtctcgggttcctagcgaaccccgacttggtccgcagaagccgcgcgccgcccaccctccggccttcccccaggcgaggcctctcagtacccgaggctcccttttctcgagcccgcagcggcagcgctcccagcgggtccccgggaaggagacagctcgggtactgagggcgggaaagcaaggaagaggccagatccccatcccttgtccctgcgccgccgccgccgccgccgccgccgggaagcccggggcccggatgcaggcaattccaccagtcgctagaggcgaaagcccgacacccagcttcggtcagagaaatgagagggaaagtaaaaatgcgtcgagctctgaggagagcccccgcttctacccgcgcctcttcccggcagccgaaccccaaacagccacccgccaggatgccgcctcctcactcacccactcgccaccgcctgcgcctccgccgccgcgggcgcaggcaccgcaaccgcagccccgccccgggcccgcccccgggcccgccccgaccacgccccggccccggccccggcccctagcgcgcgactcctgagttccagagcttgctacaggctgcggttgtttccctccttgttttcttctggttaatctttatcaggtcttttcttgttcaccctcagcgagtactgtgagagcaagtagtggggagagagggtgggaaaaacaaaaacacacacctcctaaacccacacctgctcttgctagaccccgcccccaaaagagaagcaaccgggcagcagggacggctgacacaccaagcgtcatcttttacgtgggcggaacttgtcgctgtttgacgcacctctctttcctagcgggacaccgtaggttacgt

SEQ ID NO: 15 - DNA, 45227 bp, Homo sapiens
  source 1..45227: mol_type = other DNA
ttgtaagttctctgaggcatccccagaagctgatgctgccatgcttcctatacagcctgcagaaccatgagtcaattaaacctcttttctttgtaaattacccagtctcaagtatttctttatagcaatgcaagaatggactaatacagaaaattgttactgagaagaagggcattgctataaagatacctgaaaatgtagaagtgactttggaaccggctaacaggcagaagttgaaacattttagagggctcagaagaagacagaaagatgagagaaagtttggaactcgctaggaacttgttgagtggttgtaaccaaaatactgatagtgatatagacagtgaagtccaggctgaggaggtctcagatggaaatgagaaatttattgggaatgagtaaaggtcaggtttgctatgctttagcaaagagcttagctgcattgttcctctgttctagggatctgtgaaatcttagacttaagaatgatgatttagggtatctggcagaagaaatttctaagcagcagagtgttcaagaagtaacctagctgcttctaatagcctatgctcataggcatgagcacagaaatgacctgaaattggaacttacacttaaaagggaagcagagcataaaagtttgtaaattttgcagcctggccatgtggtagtaaagaaaagctcgttctcaggagaggaagtcaagcaggctgcataaatttgcataactaaaaggaaggcaagggctgataaccaaaacaatggggagaaagactcataggactaacaggcattttattttattttatttttattttattattattatactttaagttttagggtacatgtgcacaatgtgcaggttagttgcatatgtatacatgtgccatgctggtgtgctgcacccattaactcgtcatttagcattaggtatatctcctaatgctatccctcccccctcccccaccccacaacagtccccagagtgtgatgttccccttcctgtgtccatgtgttctcattgttcaattcccacctatgagtgagaacatgtggtgtttggttttttgaccttgcaatagtttactgagaatgacgatttccaatttcatccatgtccctacaaaggacatgaactcatcattttttatggctgcatagtattccatggtgtatatgtgccacattttcttaatccagtctatcactgttggacatttgggttggttccaagtctttgctattgtgaatagtgccacaataaacatagtgtgcatgtgtctttatagcagcaggatttatagtcctttgggtatatacccagtgatgggatggctgggtcaaatggtatttctagttctagatccctgaggaatcgccacactgacttccacaatggttgaactagtttacagtcccaccaacagtgtaaaagtgttcctaataggcattttaggctttcatggtggtccctctcatcacaggccccgaggcctaggaggactgaatcatttcctgggccaggcctagggcccctgctccctcttacagccttgggactctgctccctgaatcccagctgctcaaaggggcccaggtactgttacagtaggtagctaatcaggcatgagtggggtaagagagaagtccccaccacccaccaggaatgtcaggcaaccatcagatgatggtcaggcagttgtcatactgcctctctaaaatagtaattggttgcagccagcaccagggagaggcaacttctcaatagatagaaacacctgaaattggtaactgggcgcttccaataagatctcaggaactgagagagtgggcttaacatgcacattaagaggcaaaatggtgaagtatgacctttgggggcattccaccggaaaagggaagaaagcctcaggtaagcatgtatacaactccagtaaacacactgcacacgctcaccttccaagtgcaagcagggcaccatgcatgcggcaagctcacccttagggaaggaccaagggaaaggggcacaagatgtcagaagtaggccagtgtataagatcctaggttcaaggtcaaacagggcacttgacctccaaggtgcccacttgggcctcttccaaatgtactttcctttcattcctgttctaaagctttttaataaacttttactcctgctctgaaacttgtcgcagtctctttttctgccttatgcctcttggtcaaattctttcttctgaggaggcaagaattgaggttgctgcagacccacatggatttgcagctggtaactcagataactttcaccagtaagaatacagttcaggctgctgcttcacagggtgccaggcataagccttggtggcttccataagctgtgaagccggcgggcgcacataatgcaagagttgaggcttaagaagctctgcctagattttagaggatgtatgaaaaagcctggatgtccagacagaagcctgttactggggtggaatcctcatggagaacatctactagggaagcaaggagaagaaatgtggggttgcagcccccacagagagtcccctggggcactgcctagcagagctatgacaagacagccaccgtcctccagaccccagaatggtagatccaccaacaacttgcaccctgcagcctggaaaagctgcaagcactcaatgctagcccatgagagcagctgtgggagatgaaccctggaaaaccacaggggtggttctgcccaaggttttgggagcccactcattgcatcagtgttccctgggtgtgagtcaaaggagattatttcagagctttaacatttaatgactgcccggctggctttcagacttgcaatggggccctatagcctctttcttttggcagatttctccctttcggaatggcagtatctgcccaatgcctatacccccattgtatctttgaagcaattaccttgtttttgattttacaggttcataggtagaagggactagcttcgtctcaggtgagacttgggactttggacttttgaatgaatgctggatcgagttaagactttggggaactgttggtaaggcacgacagtattttgcaatatgagaaggacattagatttgggaggggccagagttggaataacatggtttggatctctgtccccacccaaatctcatgttcaactgtaatccccagtgttggaggttgggcctggtgggaggtgagtggattatggggtggcttctaatggttttgtacagtcccctcttggtactatatagtgagttctgacaagatctagttgtttaaacgtatgtagcacctcccatttctctcttcccccagttcctgccatgtgaagtctggggtctccctatgccttccatcatgattttaagttccctatggcctgcccagaagctgatccagccatgcttcttgtacagcctgcagaactgtgagccattaaacttttctttataaattacccagtttcagttatttctttatagcagtgtaagaatggactaacacaattattaacgctagtcctcatgttgtacattaaatctctagatgtattagacgtaactgcaactttgtaccctaccctacaattttctttccccccaagccccccaaccaagggtctactctgtttctataaattcagttgttttttaattccacgtataagtgaagtacaactcagtgtagaaacttggtaaatgctagctacttgttataagctgtcagtcaaaataaaaatacagagatgaatctctaaattaagtgatttatttgggaagaaagaattgcaattagggcatacatgtagatcagatggtcttcggtatatccacacaacaaagaaaagggggaggttttgttaaaaaagagaaatgttacatagtgctctttgagaaaattcattggcactattaaggatctgaggagctggtgagtttcaactggtgagtgatggtggtagataaaattagagctgcagcaggtcattttagcaactattagataaaactggtctcaggtcacaacgggcagttgcagcagctggacttggagagaattacactgtgggagcagtgtcatttgtcctaagtgcttttctaccccctacccccactattttagttgggtataaaaagaatgacccaatttgtatgatcaactttcacaaagcatagaacagtaggaaaagggtctgtttctgcagaaggtgtagacgttgagagccattttgtgtatttattcctccctttcttcctcggtgaatgattaaaacgttctgtgtgatttttagtgatgaaaaagattaaatgctactcactgtagtaagtgccatctcacacttgcagatcaaaaggcacacagtttaaaaaacctttgtttttttacacatctgagtggtgtaaatgctactcatctgtagtaagtggaatctatacacctgcagaccaaaagacgcaaggtttcaaaaatctttgtgttttttacacatcaaacagaatggtacgtttttcaaaagttaaaaaaaaacaactcatccacatattgcaactagcaaaaatgacattccccagtgtgaaaatcatgcttgagagaattcttacatgtaaaggcaaaattgcgatgactttgcaggggaccgtgggattcccgcccgcagtgccggagctgtcccctaccagggtttgcagtggagttttgaatgcacttaacagtgtcttacggtaaaaacaaaatttcatccaccaattatgtgttgagcgcccactgcctaccaagcacaaacaaaaccattcaaaaccacgaaatcgtcttcactttctccagatccagcagcctcccctattaaggttcgcacacgctattgcgccaacgctcctccagagcgggtcttaagataaaagaacaggacaagttgccccgccccatttcgctagcctcgtgagaaaacgtcatcgcacatagaaaacagacagacgtaacctacggtgtcccgctaggaaagagaggtgcgtcaaacagcgacaagttccgcccacgtaaaagatgacgcttggtgtgtcagccgtccctgctgcccggttgcttctcttttgggggcggggtctagcaagagcaggtgtgggtttaggaggtgtgtgtttttgtttttcccaccctctctccccactacttgctctcacagtactcgctgagggtgaacaagaaaagacctgataaagattaaccagaagaaaacaaggagggaaacaaccgcagcctgtagcaagctctggaactcaggagtcgcgcgctaggggccggggccggggccggggcgtggtcggggcgggcccgggggcgggcccggggcggggctgcggttgcggtgcctgcgcccgcggcggcggaggcgcaggcggtggcgagtgggtgagtgaggaggcggcatcctggcgggtggctgtttggggttcggctgccgggaagaggcgcgggtagaagcgggggctctcctcagagctcgacgcatttttactttccctctcatttctctgaccgaagctgggtgtcgggctttcgcctctagcgactggtggaattgcctgcatccgggccccgggcttcccggcggcggcggcggcggcggcggcgcagggacaagggatggggatctggcctcttccttgctttcccgccctcagtacccgagctgtctccttcccggggacccgctgggagcgctgccgctgcgggctcgagaaaagggagcctcgggtactgagaggcctcgcctgggggaaggccggagggtgggcggcgcgcggcttctgcggaccaagtcggggttcgctaggaacccgagacggtccctgccggcgaggagatcatgcgggatgagatgggggtgtggagacgcctgcacaatttcagcccaagcttctagagagtggtgatgacttgcatatgagggcagcaatgcaagtcggtgtgctccccattctgtgggacatgacctggttgcttcacagctccgagatgacacagacttgcttaaaggaagtgactattgtgacttgggcatcacttgactgatggtaatcagttgtctaaagaagtgcacagattacatgtccgtgtgctcattgggtctatctggccgcgttgaacaccaccaggctttgtattcagaaacaggagggaggtcctgcactttcccaggaggggtggccctttcagatgcaatcgagattgttaggctctgggagagtagttgcctggttgtggcagttggtaaatttctattcaaacagttgccatgcaccagttgttcacaacaagggtacgtaatctgtctggcattacttctacttttgtacaaaggatcaaaaaaaaaaaagatactgttaagatatgatttttctcagactttgggaaacttttaacataatctgtgaatatcacagaaacaagactatcatataggggatattaataacctggagtcagaatacttgaaatacggtgtcatttgacacgggcattgttgtcaccacctctgccaaggcctgccactttaggaaaaccctgaatcagttggaaactgctacatgctgatagtacatctgaaacaagaacgagagtaattaccacattccagattgttcactaagccagcatttacctgctccaggaaaaaattacaagcaccttatgaagttgataaaatattttgtttggctatgttggcactccacaatttgctttcagagaaacaaagtaaaccaaggaggacttctgtttttcaagtctgccctcgggttctattctacgttaattagatagttcccaggaggactaggttagcctacctattgtctgagaaacttggaactgtgagaaatggccagatagtgatatgaacttcaccttccagtcttccctgatgttgaagattgagaaagtgttgtgaactttctggtactgtaaacagttcactgtccttgaagtggtcctgggcagctcctgttgtggaaagtggacggtttaggatcctgcttctctttgggctgggagaaaataaacagcatggttacaagtattgagagccaggttggagaaggtggcttacacctgtaatgccagagctttgggaggcggaggcaagaggatcacttgaagccaggagttcaagctcaacctgggcaacgtagaccctgtctctacaaaaaattaaaaacttagccgggcgtggtgatgtgcacctgtagtcctagctacttgggaggctgaggcaggagggtcatttgagcccaagagtttgaagttaccgagagctatgatcctgccagtgcattccagcctggatgacaaaacgagaccctgtctctaaaaaacaagaagtgagggctttatgattgtagaattttcactacaatagcagtggaccaaccacctttctaaataccaatcagggaagagatggttgattttttaacagacgtttaaagaaaaagcaaaacctcaaacttagcactctactaacagttttagcagatgttaattaatgtaatcatgtctgcatgtatgggattatttccagaaagtgtattgggaaacctctcatgaaccctgtgagcaagccaccgtctcactcaatttgaatcttggcttccctcaaaagactggctaatgtttggtaactctctggagtagacagcactacatgtacgtaagataggtacataaacaactattggttttgagctgatttttttcagctgcatttgcatgtatggatttttctcaccaaagacgatgacttcaagtattagtaaaataattgtacagctctcctgattatacttctctgtgacatttcatttcccaggctatttcttttggtaggatttaaaactaagcaattcagtatgatctttgtccttcattttctttcttattctttttgtttgtttgtttgtttgtttttttcttgaggcagagtctctctctgtcgcccaggctggagtgcagtggcgccatctcagctcattgcaacctctgccacctccgggttcaagagattctcctgcctcagcctcccgagtagctgggattacaggtgtccaccaccacacccggctaattttttgtatttttagtagaggtggggtttcaccatgttggccaggctggtcttgagctcctgacctcaggtgatccacctgcctcggcctaccaaagagctgggataacaggtgtgacccaccatgcccggcccattttttttttcttattctgttaggagtgagagtgtaactagcagtataatagttcaattttcacaacgtggtaaaagtttccctataattcaatcagattttgctccagggttcagttctgttttaggaaatacttttattttcagtttaatgatgaaatattagagttgtaatattgcctttatgattatccacctttttaacctaaaagaatgaaagaaaaatatgtttgcaatataattttatggttgtatgttaacttaattcattatgttggcctccagtttgctgttgttagttatgacagcagtagtgtcattaccatttcaattcagattacattcctatatttgatcattgtaaactgactgcttacattgtattaaaaacagtggatattttaaagaagctgtacggcttatatctagtgctgtctcttaagactattaaattgatacaacatatttaaaagtaaatattacctaaatgaatttttgaaattacaaatacacgtgttaaaactgtcgttgtgttcaaccatttctgtacatacttagagttaactgttttgccaggctctgtatgcctactcataatatgataaaagcactcatctaatgctctgtaaatagaagtcagtgctttccatcagactgaactctcttgacaagatgtggatgaaattctttaagtaaaattgtttactttgtcatacatttacagatcaaatgttagctcccaaagcaatcatatggcaaagataggtatatcatagtttgcctattagctgctttgtattgctattattataaatagacttcacagttttagacttgcttaggtgaaattgcaattctttttactttcagtcttagataacaagtcttcaattatagtacaatcacacattgcttaggaatgcatcattaggcgattttgtcattatgcaaacatcatagagtgtacttacacaaacctagatagtatagcctttatgtacctaggccgtatggtatagtctgttgctcctaggccacaaacctgtacaactgttactgtactgaatactatagacagttgtaacacagtggtaaatatttatctaaatatatgcaaacagagaaaaggtacagtaaaagtatggtataaaagataatggtatacctgtgtaggccacttaccacgaatggagcttgcaggactagaagttgctctgggtgagtcagtgagtgagtggtgaattaatgtgaaggcctagaacactgtacaccactgtagactataaacacagtacgctgaagctacaccaaatttatcttaacagtttttcttcaataaaaaattataactttttaactttgtaaactttttaattttttaacttttaaaatacttagcttgaaacacaaatacattgtatagctatacaaaaatattttttctttgtatccttattctagaagcttttttctattttctattttaaatttttttttttacttgttagtcgtttttgttaaaaactaaaacacacacactttcacctaggcatagacaggattaggatcatcagtatcactcccttccacctcactgccttccacctccacatcttgtcccactggaaggtttttaggggcaataacacacatgtagctgtcacctatgataacagtgctttctgttgaatacctcctgaaggacttgcctgaggctgttttacatttaacttaaaaaaaaaaaaagtagaaggagtgcactctaaaataacaataaaaggcatagtatagtgaatacataaaccagcaatgtagtagtttattatcaagtgttgtacactgtaataattgtatgtgctatactttaaataacttgcaaaatagtactaagaccttatgatggttacagtgtcactaaggcaatagcatattttcaggtccattgtaatctaatgggactaccatcatatatgcagtctaccattgactgaaacgttacatggcacataactgtatttgcaagaatgatttgttttacattaatatcacataggatgtacctttttagagtggtatgtttatgtggattaagatgtacaagttgagcaaggggaccaagagccctgggttctgtcttggatgtgagcgtttatgttcttctcctcatgtctgttttctcattaaattcaaaggcttgaacgggccctatttagcccttctgttttctacgtgttctaaataactaaagcttttaaattctagccatttagtgtagaactctctttgcagtgatgaaatgctgtattggtttcttggctagcatattaaatatttttatctttgtcttgatacttcaatgtcgttttaaacatcaggatcgggcttcagtattctcataaccagagagttcactgaggatacaggactgtttgcccattttttgttatggctccagacttgtggtatttccatgtctttttttttttttttttttttgaccttttagcggctttaaagtatttctgttgttaggtgttgtattacttttctaagattacttaacaaagcaccacaaactgagtggctttaaacaacagcaatttattctctcacaattctagaagctagaagtccgaaatcaaagtgttgacaggggcatgatcttcaagagagaagactctttccttgcctcttcctggcttctggtggttaccagcaatcctgagtgttcctttcttgccttgtagtttcaacaatccagtatctgccttttgtcttcacatggctgtctaccatttgtctctgtgtctccaaatctctctccttataaacacagcagttattggattaggccccactctaatccagtatgaccccattttaacatgattacacttatttctagataaggtcacattcacgtacaccaagggttaggaattgaacatatctttttgggggacacaattcaacccacaagtgtcagtctctagctgagcctttcccttcctgtttttctcctttttagttgctatgggttaggggccaaatctccagtcatactagaattgcacatggactggatatttgggaatactgcgggtctattctatgagctttagtatgtaacatttaatatcagtgtaaagaagcccttttttaagttatttctttgaatttctaaatgtatgccctgaatataagtaacaagttaccatgtcttgtaaaatgatcatatcaacaaacatttaatgtgcacctactgtgctagttgaatgtctttatcctgataggagataacaggattccacatctttgacttaagaggacaaaccaaatatgtctaaatcatttggggttttgatggatatctttaaattgctgaacctaatcattggtttcatatgtcattgtttagatatctccggagcatttggataatgtgacagttggaatgcagtgatgtcgactctttgcccaccgccatctccagctgttgccaagacagagattgctttaagtggcaaatcacctttattagcagctacttttgcttactgggacaatattcttggtcctagagtaaggcacatttgggctccaaagacagaacaggtacttctcagtgatggagaaataacttttcttgccaaccacactctaaatggagaaatccttcgaaatgcagagagtggtgctatagatgtaaagttttttgtcttgtctgaaaagggagtgattattgtttcattaatctttgatggaaactggaatggggatcgcagcacatatggactatcaattatacttccacagacagaacttagtttctacctcccacttcatagagtgtgtgttgatagattaacacatataatccggaaaggaagaatatggatgcataaggtaagtgatttttcagcttattaatcatgttaacctatctgttgaaagcttattttctggtacatataaatcttatttttttaattatatgcagtgaacatcaaacaataaatgttatttattttgcatttaccctattagatacaaatacatctggtctgatacctgtcatcttcatattaactgtggaaggtacgaaatggtagctccacattatagatgaaaagctaaagcttagacaaataaagaaacttttagaccctggattcttcttgggagcctttgactctaataccttttgtttccctttcattgcacaattctgtcttttgcttactactatgtgtaagtataacagttcaaagtaatagtttcataagctgttggtcatgtagcctttggtctctttaacctctttgccaagttcccaggttcataaaatgaggaggttgaatggaatggttcccaagagaattccttttaatcttacagaaattattgttttcctaaatcctgtagttgaatatataatgctatttacatttcagtatagttttgatgtatctaaagaacacattgaattctccttcctgtgttccagtttgatactaacctgaaagtccattaagcattaccagttttaaaaggcttttgcccaatagtaaggaaaaataatatcttttaaaagaataattttttactatgtttgcaggcttacttccttttttctcacattatgaaactcttaaaatcaggagaatcttttaaacaacatcataatgtttaatttgaaaagtgcaagtcattcttttcctttttgaaactatgcagatgttacattgactgttttctgtgaagttatctttttttcactgcagaataaaggttgttttgattttattttgtattgtttatgagaacatgcatttgttgggttaatttcctacccctgcccccattttttccctaaagtagaaagtatttttcttgtgaactaaattactacacaagaacatgtctattgaaaaataagcaagtatcaaaatgttgtgggttgtttttttaaataaattttctcttgctcaggaaagacaagaaaatgtccagaagattatcttagaaggcacagagagaatggaagatcaggtatatgcaaattgcatactgtcaaatgtttttctcacagcatgtatctgtataaggttgatggctacatttgtcaaggccttggagacatacgaataagcctttaatggagcttttatggaggtgtacagaataaactggaggaagatttccatatcttaaacccaaagagttaaatcagtaaacaaaggaaaatagtaattgcatctacaaattaatatttgctccctttttttttctgtttgcccagaataaattttggataacttgttcatagtaaaaataaaaaaaattgtctctgatatgttctttaaggtactacttctcgaacctttccctagaagtagctgtaacagaaggagagcatatgtacccctgaggtatctgtctggggtgtaggcccaggtccacacaatatttcttctaagtcttatgttgtatcgttaagactcatgcaatttacattttattccataactattttagtattaaaatttgtcagtgatatttcttaccctctcctctaggaaaatgtgccatgtttatcccttggctttgaatgcccctcaggaacagacactaagagtttgagaagcatggttacaagggtgtggcttcccctgcggaaactaagtacagactatttcactgtaaagcagagaagttcttttgaaggagaatctccagtgaagaaagagttcttcacttttacttccatttcctcttgtgggtgaccctcaatgctccttgtaaaactccaatattttaaacatggctgttttgcctttctttgcttctttttagcatgaatgagacagatgatactttaaaaaagtaattaaaaaaaaaaacttgtgaaaatacatggccataatacagaacccaatacaatgatctcctttaccaaattgttatgtttgtacttttgtagatagctttccaattcagagacagttattctgtgtaaaggtctgacttaacaagaaaagatttccctttacccaaagaatcccagtccttatttgctggtcaataagcagggtccccaggaatggggtaactttcagcaccctctaacccactagttattagtagactaattaagtaaacttatcgcaagttgaggaaacttagaaccaactaaaattctgcttttactgggattttgttttttcaaaccagaaacctttacttaagttgactactattaatgaattttggtctctcttttaagtgctcttcttaaaaatgttatcttactgctgagaagttcaagtttgggaagtacaaggaggaatagaaacttaagagattttcttttagagcctcttctgtatttagccctgtaggatttttttttttttttttttttttggtgttgttgagcttcagtgaggctattcattcacttatactgataatgtctgagatactgtgaatgaaatactatgtatgcttaaacctaagaggaaatattttcccaaaattattcttcccgaaaaggaggagttgccttttgattgagttcttgcaaatctcacaacgactttattttgaacaatactgtttggggatgatgcattagtttgaaacaacttcagttgtagctgtcatctgataaaattgcttcacagggaaggaaatttaacacggatctagtcattattcttgttagattgaatgtgtgaattgtaattgtaaacaggcatgataattattactttaaaaactaaaaacagtgaatagttagttgtggaggttactaaaggatggtttttttttaaataaaactttcagcattatgcaaatgggcatatggcttaggataaaacttccagaagtagcatcacatttaaattctcaagcaacttaataatatggggctctgaaaaactggttaaggttactccaaaaatggccctgggtctgacaaagattctaacttaaagatgcttatgaagactttgagtaaaatcatttcataaaataagtgaggaaaaacaactagtattaaattcatcttaaataatgtatgatttaaaaaatatgtttagctaaaaatgcatagtcatttgacaatttcatttatatctcaaaaaatttacttaaccaagttggtcacaaaactgatgagactggtggtggtagtgaataaatgagggaccatccatatttgagacactttacatttgtgatgtgttatactgaattttcagtttgattctatagactacaaatttcaaaattacaatttcaagatgtaataagtagtaatatcttgaaatagctctaaagggaatttttctgttttattgattcttaaaatatatgtgctgattttgatttgcatttgggtagattatacttttatgagtatggaggttaggtattgattcaagttttccttacctatttggtaaggatttcaaagtctttttgtgcttggttttcctcatttttaaatatgaaatatattgatgacctttaacaaattttttttatctcaaattttaaaggagatcttttctaaaagaggcatgatgacttaatcattgcatgtaacagtaaacgataaaccaatgattccatactctctaaagaataaaagtgagctttagggccgggcatggtcagaaatttgacaccaacctggccaacatggcgaaaccccgtctctactaaaaatacaaaaatcagccgggcatggtggcggcacctatagtcccagctacttgggaggatgagacaggagagtcacttgaacctgggaggagaggttgcagtgagctgagatcacgccattgcactccagcctgagcaatgaaagcaaaactccatctcaaaaaaaaaaaaagaaaagaaagaataaaagtgagctttggattgcatataaatcctttagacatgtagtagacttgtttgatactgtgtttgaacaaattacgaagtattttcatcaaagaatgttattgtttgatgttatttttattttttattgcccagcttctctcatattacgtgattttcttcacttcatgtcactttattgtgcagggtcagagtattattccaatgcttactggagaagtgattcctgtaatggaactgctttcatctatgaaatcacacagtgttcctgaagaaatagatgtaagtttaaatgagagcaattatacactttatgagttttttggggttatagtattattatgtatattattaatattctaattttaatagtaaggactttgtcatacatactattcacatacagtattagccactttagcaaataagcacacacaaaatcctggattttatggcaaaacagaggcatttttgatcagtgatgacaaaattaaattcattttgtttatttcattacttttataattcctaaaagtgggaggatcccagctcttataggagcaattaatatttaatgtagtgtcttttgaaacaaaactgtgtgccaaagtagtaaccattaatggaagtttacttgtagtcacaaatttagtttccttaatcatttgttgaggacgttttgaatcacacactatgagtgttaagagatacctttaggaaactattcttgttgttttctgattttgtcatttaggttagtctcctgattctgacagctcagaagaggaagttgttcttgtaaaaattgtttaacctgcttgaccagctttcacatttgttcttctgaagtttatggtagtgcacagagattgttttttggggagtcttgattctcggaaatgaaggcagtgtgttatattgaatccagacttccgaaaacttgtatattaaaagtgttatttcaacactatgttacagccagactaatttttttattttttgatgcattttagatagctgatacagtactcaatgatgatgatattggtgacagctgtcatgaaggctttcttctcaagtaagaatttttcttttcataaaagctggatgaagcagataccatcttatgctcacctatgacaagatttggaagaaagaaaataacagactgtctacttagattgttctagggacattacgtatttgaactgttgcttaaatttgtgttatttttcactcattatatttctatatatatttggtgttattccatttgctatttaaagaaaccgagtttccatcccagacaagaaatcatggccccttgcttgattctggtttcttgttttacttctcattaaagctaacagaatcctttcatattaagttgtactgtagatgaacttaagttatttaggcgtagaacaaaattattcatatttatactgatctttttccatccagcagtggagtttagtacttaagagtttgtgcccttaaaccagactccctggattaatgctgtgtacccgtgggcaaggtgcctgaattctctatacacctatttcctcatctgtaaaatggcaataatagtaatagtacctaatgtgtagggttgttataagcattgagtaagataaataatataaagcacttagaacagtgcctggaacataaaaacacttaataatagctcatagctaacatttcctatttacatttcttctagaaatagccagtatttgttgagtgcctacatgttagttcctttactagttgctttacatgtattatcttatattctgttttaaagtttcttcacagttacagattttcatgaaattttacttttaataaaagagaagtaaaagtataaagtattcacttttatgttcacagtcttttcctttaggctcatgatggagtatcagaggcatgagtgtgtttaacctaagagccttaatggcttgaatcagaagcactttagtcctgtatctgttcagtgtcagcctttcatacatcattttaaatcccatttgactttaagtaagtcacttaatctctctacatgtcaatttcttcagctataaaatgatggtatttcaataaataaatacattaattaaatgatattatactgactaattgggctgttttaaggctcaataagaaaatttctgtgaaaggtctctagaaaatgtaggttcctatacaaataaaagataacattgtgcttatagcttcggtgtttatcatataaagctattctgagttatttgaagagctcacctacttttttttgtttttagtttgttaaattgttttataggcaatgtttttaatctgttttctttaacttacagtgccatcagctcacacttgcaaacctgtggctgttccgttgtagtaggtagcagtgcagagaaagtaaataaggtagtttattttataatctagcaaatgatttgactctttaagactgatgatatatcatggattgtcatttaaatggtaggttgcaattaaaatgatctagtagtataaggaggcaatgtaatctcatcaaattgctaagacaccttgtggcaacagtgagtttgaaataaactgagtaagaatcatttatcagtttattttgatagctcggaaataccagtgtcagtagtgtataaatggttttgagaatatattaaaatcagatatataaaaaaaattactcttctatttcccaatgttatctttaacaaatctgaagatagtcatgtacttttggtagtagttccaaagaaatgttatttgtttattcatcttgatttcattgtcttcgctttccttctaaatctgtcccttctagggagctattgggattaagtggtcattgattattatactttattcagtaatgtttctgaccctttccttcagtgctacttgagttaattaaggattaatgaacagttacatttccaagcattagctaataaactaaaggattttgcacttttcttcactgaccattagttagaaagagttcagagataagtatgtgtatctttcaatttcagcaaacctaattttttaaaaaaagttttacataggaaatatgttggaaatgatactttacaaagatattcataatttttttttgtaatcagctactttgtatatttacatgagccttaatttatatttctcatataaccatttatgagagcttagtatacctgtgtcattatattgcatctacgaactagtgaccttattccttctgttacctcaaacaggtggctttccatctgtgatctccaaagccttaggttgcacagagtgactgccgagctgctttatgaagggagaaaggctccatagttggagtgtttttttttttttttttaaacatttttcccatcctccatcctcttgagggagaatagcttaccttttatcttgttttaatttgagaaagaagttgccaccactctaggttgaaaaccactcctttaacataataactgtggatatggtttgaatttcaagatagttacatgcctttttatttttcctaatagagctgtaggtcaaatattattagaatcagatttctaaatcccacccaatgacctgcttattttaaatcaaattcaataattaattctcttctttttggaggatctggacattctttgatatttcttacaacgaatttcatgtgtagacccactaaacagaagctataaaagttgcatggtcaaataagtctgagaaagtctgcagatgatataattcacctgaagagtcacagtatgtagccaaatgttaaaggttttgagatgccatacagtaaatttaccaagcattttctaaatttatttgaccacagaatccctattttaagcaacaactgttacatcccatggattccaggtgactaaagaatacttatttcttaggatatgttttattgataataacaattaaaatttcagatatctttcataagcaaatcagtggtctttttacttcatgttttaatgctaaaatattttcttttatagatagtcagaacattatgcctttttctgactccagcagagagaaaatgctccaggttatgtgaagcagaatcatcatttaaatatgagtcagggctctttgtacaaggcctgctaaaggtatagtttctagttatcacaagtgaaaccacttttctaaaatcatttttgagactctttatagacaaatcttaaatattagcatttaatgtatctcatattgacatgcccagagactgacttcctttacacagttctgcacatagactatatgtcttatggatttatagttagtatcatcagtgaaacaccatagaataccctttgtgttccaggtgggtccctgttcctacatgtctagcctcaggacttttttttttttaacacatgcttaaatcaggttgcacatcaaaaataagatcatttctttttaactaaatagatttgaattttattgaaaaaaaattttaaacatctttaagaagcttataggatttaagcaattcctatgtatgtgtactaaaatatatatatttctatatataatatatattagaaaaaaattgtatttttcttttatttgagtctactgtcaaggagcaaaacagagaaatgtaaattagcaattatttataatacttaaagggaagaaagttgttcaccttgttgaatctattattgttatttcaattatagtcccaagacgtgaagaaatagctttcctaatggttatgtgattgtctcatagtgactactttcttgaggatgtagccacggcaaaatgaaataaaaaaatttaaaaattgttgcaaatacaagttatattaggcttttgtgcattttcaataatgtgctgctatgaactcagaatgatagtatttaaatatagaaactagttaaaggaaacgtagtttctatttgagttatacatatctgtaaattagaacttctcctgttaaaggcataataaagtgcttaatacttttgtttcctcagcaccctctcatttaattatataattttagttctgaaagggacctataccagatgcctagaggaaatttcaaaactatgatctaatgaaaaaatatttaatagttctccatgcaaatacaaatcatatagttttccagaaaatacctttgacattatacaaagatgattatcacagcattataatagtaaaaaaatggaaatagcctctttcttctgttctgttcatagcacagtgcctcatacgcagtaggttattattacatggtaactggctaccccaactgattaggaaagaagtaaatttgttttataaaaatacatactcattgaggtgcatagaataattaagaaattaaaagacacttgtaattttgaatccagtgaatacccactgttaatatttggtatatctctttctagtctttttttcccttttgcatgtattttctttaagactcccacccccactggatcatctctgcatgttctaatctgcttttttcacagcagattctaagcctctttgaatatcaacacaaacttcaacaacttcatctatagatgccaaataataaattcatttttatttacttaaccacttcctttggatgcttaggtcattctgatgttttgctattgaaaccaatgctatactgaacacttctgtcactaaaactttgcacacactcatgaatagcttcttaggataaatttttagagatggatttgctaaatcagagaccattttttaaaattaaaaaacaattattcatatcgtttggcatgtaagacagtaaattttccttttattttgacaggattcaactggaagctttgtgctgcctttccggcaagtcatgtatgctccatatcccaccacacacatagatgtggatgtcaatactgtgaagcagatgccaccctgtcatgaacatatttataatcagcgtagatacatgagatccgagctgacagccttctggagagccacttcagaagaagacatggctcaggatacgatcatctacactgacgaaagctttactcctgatttgtacgtaatgctctgcctgctggtactgtagtcaagcaatatgaaattgtgtcttttacgaataaaaacaaaacagaagttgcatttaaaaagaaagaaatattaccagcagaattatgcttgaagaaacatttaatcaagcatttttttcttaaatgttcttctttttccatacaattgtgtttaccctaaaataggtaagattaacccttaaagtaaatatttaactatttgtttaataaatatatattgagctcctaggcactgttctaggtaccgggcttaatagtggccaaccagacagccccagccccagcccctacattgtgtatagtctattatgtaacagttattgaatggacttattaacaaaaccaaagaagtaattctaagtcttttttttcttgacatatgaatataaaatacagcaaaactgttaaaatatattaatggaacatttttttactttgcattttatattgttattcacttcttatttttttttaaaaaaaaaagcctgaacagtaaattcaaaaggaaaagtaatgataattaattgttgagcatggacccaacttgaaaaaaaaaatgatgatgataaatctataatcctaaaaccctaagtaaacacttaaaagatgttctgaaatcaggaaaagaattatagtatacttttgtgtttctcttttatcagttgaaaaaaggcacagtagctcatgcctgtaagaacagagctttgggagtgcaaggcaggcggatcacttgaggccaggagttccagaccagcctgggcaacatagtgaaaccccatctctacaaaaaataaaaaagaattattggaatgtgtttctgtgtgcctgtaatcctagctattccgaaagctgaggcaggaggatcttttgagcccaggagtttgaggttacagggagttatgatgtgccagtgtactccagcctggggaacaccgagactctgtcttatttaaaaaaaaaaaaaaaaaaatgcttgcaataatgcctggcacatagaaggtaacagtaagtgttaactgtaataacccaggtctaagtgtgtaaggcaatagaaaaattggggcaaataagcctgacctatgtatctacagaatcagtttgagcttaggtaacagacctgtggagcaccagtaattacacagtaagtgttaaccaaaagcatagaataggaatatcttgttcaagggacccccagccttatacatctcaaggtgcagaaagatgacttaatataggacccattttttcctagttctccagagtttttattggttcttgagaaagtagtaggggaatgttttagaaaatgaattggtccaactgaaattacatgtcagtaagtttttatatattggtaaattttagtagacatgtagaagttttctaattaatctgtgccttgaaacattttcttttttcctaaagtgcttagtattttttccgttttttgattggttacttgggagcttttttgaggaaatttagtgaactgcagaatgggtttgcaaccatttggtatttttgttttgttttttagaggatgtatgtgtattttaacatttcttaatcatttttagccagctatgtttgttttgctgatttgacaaactacagttagacagctattctcattttgctgatcatgacaaaataatatcctgaatttttaaattttgcatccagctctaaattttctaaacataaaattgtccaaaaaatagtattttcagccactagattgtgtgttaagtctattgtcacagagtcattttacttttaagtatatgtttttacatgttaattatgtttgttatttttaattttaactttttaaaataattccagtcactgccaatacatgaaaaattggtcactggaattttttttttgacttttattttaggttcatgtgtacatgtgcaggtgtgttatacaggtaaattgcgtgtcatgagggtttggtgtacaggtgatttcattacccaggtaataagcatagtacccaataggtagttttttgatcctcacccttctcccaccctcaagtaggccctggtgttgctgtttccttctttgtgtccatgtatactcagtgtttagctcccacttagaagtgagaacatgcggtagttggttttctgttcctggattagttcacttaggataatgacctctagctccatctggtttttatggctgcatagtattccatggtgtatatgtatcacattttctttatccagtctaccattgataggcatttaggttgattccctgtctttgttatcatgaatagtgctgtgatgaacatacacatgcatgtgtctttatggtagaaaaatttgtattcctttaggtacatatagaataatggggttgctagggtgaatggtagttctattttcagttatttgagaaatcttcaaactgcttttcataatagctaaactaatttacagtcccgccagcagtgtataagtgttcccttttctccacaaccttgccaacatctgtgattttttgactttttaataatagccattcctagagaattgatttgcaattctctattagtgatattaagcattttttcatatgctttttagctgtctgtatatattcttctgaaaaattttcatgtcctttgcccagtttgtagtggggtgggttgttttttgcttgttaattagttttaagttccttccagattctgcatatccctttgttggatacatggtttgcagatatttttctcccattgtgtaggttgtcttttactctgttgatagtttcttttgccatgcaggagctcgttaggtcccatttgtgtttgtttttgttgcagttgcttttggcgtcttcatcataaaatctgtgccagggcctatgtccagaatggtatttcctaggttgtcttccagggtttttacaattttagattttacgtttatgtctttaatccatcttgagttgatttttgtatatggcacaaggaaggggtccagtttcactccaattcctatggctagcaattatcccagcaccatttattgaatacggagtcctttccccattgcttgttttttgtcaactttgttgaagatcagatggttgtaagtgtgtggctttatttcttggctctctattctccattggtctatgtgtctgtttttataacagtaccctgctgttcaggttcctatagccttttagtataaaatcggctaatgtgatgcctccagctttgttctttttgcttaggattgctttggctatttgggctcctttttgggtccatattaattttaaaacagttttttctggttttgtgaaggatatcattggtagtttataggaatagcattgaatctgtagattgctttgggcagtatggccattttaacaatattaattcttcctatctatgaatatggaatgtttttccatgtgtttgtgtcatctctttatacctgatgtataaagaaaagctggtattattcctactcaatctgttccaaaaaattgaggaggaggaactcttccctaatgaggccagcatcattctgataccaaaacctggcagagacacaacagaaaaaagaaaacttcaggccaatatccttgatgaatatagatgcaaaaatcctcaacaaaatactagcaaaccaaatccagcagcacatcaaaaagctgatctactttgatcaagtaggctttatccctgggatgcaaggttggttcaacatacacaaatcaataagtgtgattcatcacataaacagagctaaaaacaaaaaccacaagattatctcaataggtagagaaaaggttgtcaataaaatttaacatcctccatgttaaaaaccttcagtaggtcaggtgtagtgactcacacctgtaatcccagcactttgggaggccaaggcgggcatatctcttaagcccaggagttcaagacgagcctaggcagcatggtgaaaccccatctctacaaaaaaaaaaaaaaaaaaaaattagcttggtatggtgacatgcacctatagtcccagctattcaggaggttgaggtgggaggattgtttgagcccgggaggcagaggttggcagcgagctgagatcatgccaccgcactccagcctgggcaacggagtgagaccctgtctcaaaaaagaaaaatcacaaacaatcctaaacaaactaggcattgaaggaacatgcctcaaaaaaataagaaccatctatgacagacccatagccaatatcttaccaaatgggcaaaagctggaagtattctccttgagaaccgtaacaagacaaggatgtccactctcaccactccttttcagcatagttctggaagtcctagccagagcaatcaggaaagagaaagaaagaaagacattcagataggaagagaagaagtcaaactatttctgtttgcaggcagtataattctgtacctagaaaatctcatagtctctgcccagaaactcctaaatctgttaaaaatttcagcaaagttttggcattctctatactccaacaccttccaaagtgagagcaaaatcaagaacacagtcccattcacaatagccgcaaaacgaataaaatacctaggaatccagctaaccagggaggtgaaagatctctatgagaattacaaaacactgctgaaagaaatcagagatgacacaaacaaatggaaatgttcttttttaacaccttgctttatctaattcacttatgatgaagatactcattcagtggaacaggtataataagtccactcgattaaatataagccttattctctttccagagcccaagaaggggcactatcagtgcccagtcaataatgacgaaatgctaatatttttcccctttacggtttctttcttctgtagtgtggtacactcgtttcttaagataaggaaacttgaactaccttcctgtttgcttctacacatacccattctctttttttgccactctggtcaggtataggatgatccctaccactttcagttaaaaactcctcctcttactaaatgttctcttaccctctggcctgagtagaacctagggaaaatggaagagaaaaagatgaaagggaggtggggcctgggaagggaataagtagtcctgtttgtttgtgtgtttgctttagcacctgctatatcctaggtgctgtgttaggcacacattattttaagtggccattatattactactactcactctggtcgttgccaaggtaggtagtactttcttggatagttggttcatgttacttacagatggtgggcttgttgaggcaaacccagtggataatcatcggagtgtgttctctaatctcactcaaatttttcttcacattttttggtttgttttggtttttgatggtagtggcttatttttgttgctggtttgttttttgtttttttttgagatggcaagaattggtagttttatttattaattgcctaagggtctctactttttttaaaagatgagagtagtaaaatagattgatagatacatacatacccttactggggactgcttatattctttagagaaaaaattacatattagcctgacaaacaccagtaaaatgtaaatatatccttgagtaaataaatgaatgtatattttgtgtctccaaatatatatatctatattcttacaaatgtgtttatatgtaatatcaatttataagaacttaaaatgttggctcaagtgagggattgtggaaggtagcattatatggccatttcaacatttgaacttttttcttttcttcattttcttcttttcttcaggaatatttttcaagatgtcttacacagagacactctagtgaaagccttcctggatcaggtaaatgttgaacttgagattgtcagagtgaatgatatgacatgttttcttttttaatatatcctacaatgcctgttctatatatttatattcccctggatcatgccccagagttctgctcagcaattgcagttaagttagttacactacagttctcagaagagtctgtgagggcatgtcaagtgcatcattacattggttgcctcttgtcctagatttatgcttcgggaattcagacctttgtttacaatataataaatattattgctatcttttaaagatataataataagatataaagttgaccacaactactgttttttgaaacatagaattcctggtttacatgtatcaaagtgaaatctgacttagcttttacagatataatatatacatatatatatcctgcaatgcttgtactatatatgtagtacaagtatatatatatgtttgtgtgtgtatatatatatagtacgagcatatatacatattaccagcattgtaggatatatatatgtttatatattaaaaaaaagttataaacttaaaaccctattatgttatgtagagtatatgttatatatgatatgtaaaatatataacatatactctatgatagagtgtaatatattttttatatatattttaacatttataaaatgatagaattaagaattgagtcctaatctgttttattaggtgctttttgtagtgtctggtctttctaaagtgtctaaatgatttttccttttgacttattaatggggaagagcctgtatattaacaattaagagtgcagcattccatacgtcaaacaacaaacattttaattcaagcattaacctataacaagtaagttttttttttttttttgagaaagggaggttgtttatttgcctgaaatgactcaaaaatatttttgaaacatagtgtacttatttaaataacatctttattgtttcattcttttaaaaaatatctacttaattacacagttgaaggaaatcgtagattatatggaacttatttcttaatatattacagtttgttataataacattctggggatcaggccaggaaactgtgtcatagataaagctttgaaataatgagatccttatgtttactagaaattttggattgagatctatgaggtctgtgacatattgcgaagttcaaggaaaattcgtaggcctggaatttcatgcttctcaagctgacataaaatccctcccactctccacctcatcatatgcacacattctactcctacccacccactccaccccctgcaaaagtacaggtatatgaatgtctcaaaaccataggctcatcttctaggagcttcaatgttatttgaagatttgggcagaaaaaattaagtaatacgaaataacttatgtatgagttttaaaagtgaagtaaacatggatgtattctgaagtagaatgcaaaatttgaatgcatttttaaagataaattagaaaacttctaaaaactgtcagattgtctgggcctggtggcttatgcctgtaatcccagcactttgggagtccgaggtgggtggatcacaaggtcaggagatcgagaccatcctgccaacatggtgaaaccccgtctctactaagtatacaaaaattagctgggcgtggcagcgtgtgcctgtaatcccagctacctgggaggctgaggcaggagaatcgcttgaacccaggaggtgtaggttgcagtgagtcaagatcgcgccactgcactttagcctggtgacagagctagactccgtctcaaaaaaaaaaaaaaatatcagattgttcctacacctagtgcttctataccacactcctgttagggggcatcagtggaaatggttaaggagatgtttagtgtgtattgtctgccaagcactgtcaacactgtcatagaaacttctgtacgagtagaatgtgagcaaattatgtgttgaaatggttcctctccctgcaggtctttcagctgaaacctggcttatctctcagaagtactttccttgcacagtttctacttgtccttcacagaaaagccttgacactaataaaatatatagaagacgatacgtgagtaaaactcctacacggaagaaaaacctttgtacattgtttttttgttttgtttcctttgtacattttctatatcataatttttgcgcttcttttttttttttttttttttttttttccattatttttaggcagaagggaaaaaagccctttaaatctcttcggaacctgaagatagaccttgatttaacagcagagggcgatcttaacataataatggctctggctgagaaaattaaaccaggcctacactcttttatctttggaagacctttctacactagtgtgcaagaacgagatgttctaatgactttttaaatgtgtaacttaataagcctattccatcacaatcatgatcgctggtaaagtagctcagtggtgtggggaaacgttcccctggatcatactccagaattctgctctcagcaattgcagttaagtaagttacactacagttctcacaagagcctgtgaggggatgtcaggtgcatcattacattgggtgtctcttttcctagatttatgcttttgggatacagacctatgtttacaatataataaatattattgctatcttttaaagatataataataggatgtaaacttgaccacaactactgtttttttgaaatacatgattcatggtttacatgtgtcaaggtgaaatctgagttggcttttacagatagttgactttctatcttttggcattctttggtgtgtagaattactgtaatacttctgcaatcaactgaaaactagagcctttaaatgatttcaattccacagaaagaaagtgagcttgaacataggatgagctttagaaagaaaattgatcaagcagatgtttaattggaattgattattagatcctactttgtggatttagtccctgggattcagtctgtagaaatgtctaatagttctctatagtccttgttcctggtgaaccacagttagggtgttttgtttattttattgttcttgctattgttgatattctatgtagttgagctctgtaaaaggaaattgtattttatgttttagtaattgttgccaactttttaaattaattttcattatttttgagccaaattgaaatgtgcacctcctgtgccttttttctccttagaaaatctaattacttggaacaagttcagatttcactggtcagtcattttcatcttgttttcttcttgctaagtcttaccatgtacctgctttggcaatcattgcaactctgagattataaaatgccttagagaatatactaactaataagatctttttttcagaaacagaaaatagttccttgagtacttccttcttgcatttctgcctatgtttttgaagttgttgctgtttgcctgcaataggctataaggaatagcaggagaaattttactgaagtgctgttttcctaggtgctactttggcagagctaagttatcttttgttttcttaatgcgtttggaccattttgctggctataaaataactgattaatataattctaacacaatgttgacattgtagttacacaaacacaaataaatattttatttaaaattctggaagtaatataaaagggaaaatatatttataagaaagggataaaggtaatagagcccttctgccccccacccaccaaatttacacaacaaaatgacatgttcgaatgtgaaaggtcataatagctttcccatcatgaatcagaaagatgtggacagcttgatgttttagacaaccactgaactagatgactgttgtactgtagctcagtcatttaaaaaatatataaatactaccttgtagtgtcccatactgtgttttttacatggtagattcttatttaagtgctaactggttattttctttggctggtttattgtactgttatacagaatgtaagttgtacagtgaaataagttattaaagcatgtgtaaacattgttatatatcttttctcctaaatggagaattttgaataaaatatatttgaaattttgcctctttcagttgttcattcagaaaaaaatactatgatatttgaagactgatcagcttctgttcagctgacagtcatgctggatctaaactttttttaaaattaattttgtcttttcaaagaaaaaatatttaaagaagctttataatataatcttatgttaaaaaaactttctgcttaactctctggatttcattttgatttttcaaattatatattaatatttcaaatgtaaaatactatttagataaattgtttttaaacattcttattattataatattaatataacctaaactgaagttattcatcccaggtatctaatacatgtatccaaagtaaaaatccaaggaatctgaacactttcatctgcaaagctaggaataggtttgacattttcactccaagaaaaagtttttttttgaaaatagaatagttgggatgagaggtttctttaaaagaagactaactgatcacattactatgattctcaaagaagaaaccaaaacttcatataatactataaagtaaatataaaatagttccttctatagtatatttctataatgctacagtttaaacagatcactcttatataatactattttgattttgatgtagaattgcacaaattgatatttctcctatgatctgcagggtatagcttaaagtaacaaaaacagtcaaccacctccatttaacacacagtaacactatgggactagttttattacttccattttacaaatgaggaaactaaagcttaaagatgtgtaatacaccgcccaaggtcacacagctggtaaaggtggatttcatcccagacagttacagtcattgccatgggcacagctcctaacttagtaactccatgtaactggtactcagtgtagctgaattgaaaggagagtaaggaagcaggttttacaggtctacttgcactattcagagcccgagtgtgaatccctgctgtgctgcttggagaagttacttaacctatgcaaggttcattttgtaaatattggaaatggagtgataatacgtacttcaccagaggatttaatgagaccttatacgatccttagttcagtacctgactagtgcttcataaatgctttttcatccaatctgacaatctccagcttgtaattggggcatttagaacatttaatatgattattggcatggtaggttaaagctgtcatcttgctgttttctatttgttctttttgttttctccttacttttggatttttttattctactatgtcttttctattgtcttattaactatactctttgatttattttagtggttgttttagggttatacctctttctaatttaccagtttataaccagtttatatactacttgacatatagcttaagaaacttactgttgttgtctttttgctgttatggtcttaacgtttttatttctacaaacattataaactccacactttattgttttttaattttacttatacagtcaattatcttttaaagatatttaaatataaacattcaaaacaccccaattaaaagtcagagattgttaataccacatgatctcacttacacacagaattgaaaaacttggaactcatagaagcagagagtaaaaacatggttaccaggtgctggggagaggcggtgggctggggagatgttggtcaaagttagacaggaggaataagttcaagagatctattgtacaacttattcagttagataggaggaataagctaaagatcaagagatctattgtacaatgtgactataaccaacaacatatattgtacacttgaaaattgctaacagtatcttttaagtgttctctctacaaataaatatgtgaggtaatgtatatattaattaactgtagtcatttcacaatgtatacttatttcaaaacatcatattgtatgctataaatatatacaacttttatttttcaattttagaaatgtccttaaaaaatcagattttcagatcagataaaaaagcaagacccaactatatgctgccaacaggaaacacaccttaaaaataaaggacgaacaaacagattaaaagtaaaaggatggagaaaagatacatcatattggtaattagaagaaaactggagtgacaatatgaaacaaaatagatttcagagcaaagaatattaccaggggtaaaaatgatcattttataatgataaaagagtcagttcagcaaaaggatataacagtcctaaatgttttttcacctcatagctgtgtcaaaatagatgaagcaaaaactgatagaactgtaagaagtagacaagtccacaattatgtttggagattttttttttttttttttttgtcgcccaggctggagtgcagtggcaggatctcagctcactgcaagctccgcctcccaggttcacgccattctcctgcttcagcctccccagtagctgggactacaggcggccaccaccacgcctggctaatttttttgtatttttagtagagacggggtttcaccgtgttagccaggatggtctcgatctcctgacctcgtgatctgcctgcctcggcctcccaaagtgctgggattacaggcatgagccactgcacgcagcctggagattttaatatcctttcaatgtttagtagaacaagaatacacaaaatcagtaaggatatagaagattagaacaagactatcaaacaatttgacttaaatgacatttgtagagcacagcagtccccaacaacaataaatcacacattctttccaagagtacatgaaacatgtaccaagatagaccgtattttgagccatgaaacaaatcttgataaatttaaaaggattcaagtcatagaaaatatgttctctgaccacaatggaattaaattattaaccaataacaaatatctgggaaaacctcaaaaacttggacaccagcgcttttaaaagactaaataatttctaaattatctgtgttggggggaaaagagaaatggattagagagcaaaaagggtatcagagtgctgtggtacgatttttatgaagagtggaacagaatctgcctttggcgtttccccactacagcccattcttcacattgataacagcatgatccttctaaaattaaatctaacgatcacttctgcttaatggctctccaacacttacagaattaggtccaaaattctagcacagtttctgttcatctttctaacctttcttcccacaggtctagctagtacgtatttcttttattgcatttattacactattcctttgcttatctatctccccacctaggctaaagaacaagattcttgtctttttcatttttgtgtctcagtgcctagcatggtgccaggcacacagcatgcttccagtaaatgttagctggatggatgtaatgagtatattaaatattaatttatttgtttttccccaaaaagaattatttcctgcaaatcaaggaaattgctttctttatataatcaaaaacttattttcccagaagattcttcattaaaaattaagcctatgcacaacctagctctaaagtttcaaagattttaggcagcaatttttcaatctttttgaagtaatacatttgaatcttttcaaatttctgtttctgcatttgtgccacaccatctcatctcttgctgaaatgtttttgttaaattaattgcttgataaattgctaagtacttttcatcagaccaattaggacaatagtaagtatccatctgtggagcgcggacattcaagaaatctgatccagtatttagaaagtcattcctgagctgagttggctcaaactggcaccttctggcatttgcttgtgggtggggaatgtggaatgctttgaaagctgaatgagtttgtcaagttttaaaattcccttatggctaaaggaaaacaacattcattgtttaaaaacaccattgtttgttttttctgcttttttgttctttggagcctgaatctgcaaaaacactcacacccagcattttgcttcatgtaccactcctaagatgtttttagagacttgaatagtgtctccgcactactttttattgtgattgttcagaatgttcataacaaatggtaaaaagtcagttttagtgctcaaattgagttttatggagaaagaccataatttatgtttgtcattgtaaattgataggagaatttttggaagtttgcgtcctagaaccagatttccaaggctcagatccttattttctcacttcctagctgtgtgaccttagacaaggtattaaacctgtctgtgctgcctcagtgtcctcatctattctttaagagtaagaatagaacctacccgatagagtcacttgaagattaagtgggttagtaaattcagaatgcttggaacagtaactagcacagaataagtgtccaataaaattgggttgcagctattatcagtattattcctgtcataatcatcatcaccattaagcaattaaatgtagagttccaaaatttgattatgaaactacagttatacagccatgattcccggtgataccacgtcagtaacaagattatttccttagcttgagccagtcactacctcattgcatgtggcagagtgtgttgccgtaggcaaatgtcattgtagggaatgaaaaaaaaattgcctgtgagctgctctccagaggcctcatcccattttcccatcgtccactttactccatctccactgccactattaggaccttatcatttcttgtctagattaattcaacagcttccttccttctagtctccatgatttcacccactagccatcccctcccctttgcccaattttctccatttatggtagagtgatctttctaataggaaactcctgacttgccttaaaaagccctcattgaggccggacgtggtggctcatgcctgtaatcccagcactttgggaggccgaggcaggtggatcacgaggtcaagagattgagaccatcgtgactaacacagtgaaaccccatctgtactaaaaatacaagaaattagccaggcgtggtggcgggtgcctgtagtcgcagctacttgggaggctgaggcaggagaatggcgtgaacccgggaggcagagcttgcagtgagccgagattgcgccactgcactccagcctgggcgacagagtgagactccgtctcaaaaaaaaaaagccctcattgacaaccttcaacccacaatccatggtgaagcacaggagccttggggatctgcccccagcacacctctccacccttgtctctcactgctcctgccttcatggagagccctgatgaactatttgtagtttcccctgactcaccttgctgttactgggcctgtgtgcgtgttgctcccactacctgcaatacgcttacccacttcacctgggtgaactttacttaggattcaccttaggtgggcatcatgttcttccaggcccctcctctaacttttagttgagagtattccagacttaaggctccatgggatagggatcttgtctatgcaccagcttattcccaactgcctggcacgtaatgcatttattaaatatatattgaattgattaccctacttggggctcttgtttgcttctacacttacagttctagcatagcacttaactcattatcatgcatcattattatgggtttgttttgtctcccattagactgtgagctccacaaggctgtgtccttgtcttatacatcattgtatttccagcttccaacatagtgcttgccatgacacaggaagtcagtaagctctgaatgaatgaatagtatctacataccattaatctgaggtttaaagtttccccaaattctgaagcaaggggatttacggacttccctgacaatttttggatgtcatcccaatgataccactaacattttaagggacagcttgcatatatacatttttctggatggcagttttttttcccacaggcttcatcagatatttctccatagccttcctcagattctcaaaggggtctctgattcccccaaaagataagaaactgtcataaaaaattatttctaaatatcaattgttaaataaaatgtttgcaaagcagcctgatgaatcatttcaggccacttgaccccgatgagttagagagtttgtgctctgcaatctgactgcttccagcagtctcactgctgctggactgtggcacttccaattggcagcagggcaagtttcttctggatgaatattctgtcataggggtcccccttccacacatacctgtaggagcagtttgaaactcatatgcatggtcttcctggttctaggcacatgagtcatttaagctgctggagccaggaccagctagtatgctagcccggcattcagaaagttaaaatttggggtcaaaactgagaaccttctttgatccaccttggccagacattttctctggcttccattaatagcctcaacattttttttttttctggcctagacccacacaggcaagagaccagagcttctctaaggagctaagggaaagcacattttaaaaataacttgagcaaatgaattcatctggcaaaagcaaccccactacgtaaaataaacctttttagtttcgcaatagcagttcctgaaaatgtaaacaacctcagggtctacatgcactgaatcatttgctgaacagaaagtccctggtccaaattctgcaagaataaacaccttacaaaactaggggtcaatgaccttcatatgggaacaaggagggtgtggggggcagcaacccaccctgaggacaatgagaaagtcttgagacttgatattcaaaatgctggctttctaaaccaaaaactggcatgagtggagggagaaggggagggtgggcacagtctatgcctcaggctcttgctcagaccctaccaggcccctgccttccctagggaaagcgagagtctactcactgtcatgaagccagaggaaggccctgcaggtttcactgtgtgttctgttgacaagatgatggttccattgaaactgtaataacatacttggccaactaagcccatacgatcgtagtaactttgtacccagtcctagcttttcaaacataatgataatatgttctttctaatgtggcccatactgttctaatgaacttatgctgagtttttctgagtactagaataatattcgccataaataatagatataattattctcatttaatatttgcgtagctcttctttaaagcagaaagtattttctcattccttactagaacctttctgtgtgaggagcactgagctagaacccatatcttagaatggtcagaatttggagaaattcagggaaaaggcactggactcatttttaaagactagaaaatgcaacctccagaaaaagattcaagagttttttactcccagagatgtaggaaagattggagtaaatcttaatattatatttcaggtaaacaaaggatcactgtcaaaatagcagcatttattgagtaatggctgtgtgccaggtactttacagtttcacatttaaccctcataataaccttgtaaagtggatatcccctcagtacatgatgagaacactgaagcttaggttaaatgattgtccaaatcggacaatcattttcaaaatctccccctttttttctcctttcttatctgcaaggcagattgccctttccctttcagtgaaacttgtgcatgaccacatgactctctttggccaatgaaacatgaacaagcagcgtttatcactttcagatggaaggctttgcatgagctttgcctccttttcactctgccacagtggccactaacattccagatagtggcgctctgcaggctaggtcctatagtgggagctatgggcagagccccctttcccacccccatcaagatgtgcatgctgcataagccatgcattaatctttgcagttttaagccactaagttttggagttatattaatcattaatcatggttctcaagagaaacagagtgggggagtggtattcattatgggaattggcttacatgattatggaagctgagtagtcccccagtctgctgtttttgagctggagaactagaggagccagtggtataattcagcccaagcctgaaggcctgagaaatgggatgggggaattgggagggtgggtgtgctagggtaggataagtcctgaagttcaaaggccagccagaaggtggatgtttcagcaccagaagagagagcaaattcgcttttcttctgcctttttgtcctctctgggccctcaatggattggatgatgccctcccacattggtaagggtggatcttctatactcagtctgctaatttcttccagaaacatcttcacagacacatccagaaataatgttttaccagctatctcggtatcccttagcctagtccatatttaaaaattaatgatcacaagcagttgtttgtttccacagcaaaacctgggtgacagaccaagtgacccagatgactagaatttgaccttcttttgttgcccacaccatactctgaactaacatgctgtgctgccttccaagtggagaatgatggctaagtatcttctacctaatttgagtcacagaaaaaaaaaaaaaaggttattaactgcagtgacaagaattgtgattccccagggggcagatcaagactgatagataagagaagtgaggaacatctggggaatgtccattgaaaatttactcagaagagaagaataattaatataataatatgatatattgaattataataaataatattttgatgtatttccttccaggcatgtttaagttatagactttgagtatattttctcaaagggggttctatgtaagagactatttcttaatatagttcctagcttggaattgctcttgctggtttaagctgagcttattttattacagacttcacaacaataacgttttccttcactagtcagtacacaagatggtcttcatttccagtttggaatcccacactatcagagcctgagacaaggactagtatgcagttagtttgtttgggaggtgattccaggaagtgggaatgagagatcagtcagcctgcaacacgaaggaggaaaagtcaatataaggatgaatttggcaattggccgtttcatgcaactggggctaaattttgcttggctctctaagaaatgtaaagaatgcctcccgtaattgctcacctcaagtatttattcattggctctcatgctccattggttgtccatgagaactttagccctccctcgctgcagcacagacactgtgctttctcctaggctgagcaagctcctgcatctgtggaaaccgtcccggggcagatagtgaaataatgactgctgcgtgcttgagatctgggaaagaggccacatcataagtgcactgaaatcagagatgtgtcaagagatgtgacacagggcatctgaggtgtctactgcaccagctataactccctaaacgctaatctcagttcttacagaggggatggatgcaagggaacagtcatgattgagagcaccgaagaagctctgtatgaaccttaggcaagtttcctaatctccaaaatgaaggtaataatacccaccatccaagatcttcgggaggaatagatgaactaatgtatgtgaaaatgtccagcacaggtcctaacccatagtaggtgctcaccaaatgttagttccctgccctccacgttgtgtgtatccggagctgcactagatgctgaggcaaatggtctcaaatgtactttaacacttaatgactgagattttttctgagctgcctacaggttattgactatattcattattaataataatatatatggccacttcaggcaactggggctaaattttgcttggctctctaagaaatgtaaagaatgcctcctgtaattgctcacctcaagtatttattcattggctctcgtgctttattggttgtccctgaggactttagccctctctcactgcagcacagacactgtgctttctcctagtttctgtggcaagtgacaggagcccacctcaaactaaagcaaaagggacttcattggctcttgtagctaggaattccagggttggcactggctttgggcactactggatgcaggaattcaaacaatgtcttcaactctttcttttggtgtttctctcagctgtgcttctcttgtcgtttctttttcccattttacagataagttcatccgtaactgagagaggtgaaaaggggatggctgcagagaactctggcttatatcatccttgcttgctgacctcaaggtccatgtataaattctcagagaagaagccctctggttggtgatgcttggaacatgccctggagggtgggccccttgaagtggagcttgctggaaccacatgggctggagcaaggcgctagggccagaagagagaggtaggcagggctgctggccaggcactcttcaccaagacaaggcaagaggaggggcatgattgaggcagtgatacagaaagcagacagtagaggtcgtggcaagtgtgccgttacttgctacctgtggttgatgggagagtcacaccacatttaggaggagagaatccatttgccacttctgacaatgccacaagaatcacatatttcatccagaggttgaatttggcccatgctgagctttaaaatacagagctgtcttggaacaatggctcagtacattcatttggtgtccaacaaagcctgcctctgttgccttccctctctctgtgtgcccttcaagatcttcattgtgctttggggagagaaagagaaaatgtcatatcagggtagctcaccccatgtgtcctggactcaggaaaagagtatcttatcaccttactcttttgttattataaaaaataaagttgaacgtcttcaaataaaataaagaagtatagaaaaaattttaaattaacctgttatgattctacctagagaaccattgtcaacatcttggtatatgtacttccagatactttcctatgaatatatacattgtagattttttaatattaaaaggctatcatgctgctttgtatacaggctttctttactgatatgtaatataatacacagacaaatatacaaatcctaagccatcaactcattgaatttttattcattgtttttaatacctgcattgtgttccattgttaggctatgtcacaacatatttaattaagcccctattgatgaatattaatttactctatttgccagttcattccagtccaacatttattgagtgtctacttacgggccaggcactcttgtattcatcaagatcaccacattatctgtatcagttatttattgccacaataaaactgcataacaaatcactccaaaatgtagcaccttaaaactacaactacttattatttctcaagagtcaatgggtcagctgagcagttctgccgataggggtcaaggtcaacacatttcaactagactacttgtaaaaaagaatgagtgtctgggtaggtgtgttcttctaaaaataaaacaaggaatgaggaaattgcaggtaggataagaggggtggttggcaaccaaaccccacaaaaggcagacaaattttaaggaaacataatgccagactcctatgtcatcatccaagtagatgcagtgaagtataacctggggcgtagtagggtaggagtggggagagcagaggagaaggaagggagattgcttttcatcacttttggattccctaataacagacatgactgccagtattaaaatttaacaaaggatatctgatcattaattttcctgtataagtcactggtgatcttcaacatctctccctcccttcctcccttccttcctcccaccctcccttccttccttctttcctcttttgctttcaacttccttttctcgtttccttttgctttctttctcttctcccttttttctgtcactctgggcgtatgtagtagtgtaaaaaggttgacagagaaatcaaatataacaggagcagggccctgagaaaagcacctggcatcctgtaggcaaaccattgtttctaaaagaagggactgagagattgaggagctcaggacattgccaaatgaacaaggcaagcacatttattcagtaccaaacaaacggaaaacggcctttccaaataactgacctataaaacagccttttcacaagagtaccgtaattactggccaacagcaacaatgaaaaacaactcccaaacaaagaaatatttctggattaaaagccatgagatctggattctaacaagctgtgctcctcaaactacaagtacaaaatctggctctaaactaacaagctatgagcctcaaactgatgactggcatgtttgggtctccatctccttcttgggggttggggtcttagagacccttttccacgccctgattctcttactagtgtgtatgctttccttttgacttctcatgctgaccgtctgagcaggagtgagaagcaatttcaaaggaaaacatcgtttatcatctgctgaaagaaaccaaaaagaacacaggaaaacaaaaagacaaggaaagggaatgaaaatgtaattcattttattaaaaagaagaattattcttctgggacactggatagaaaccttaatgagttacctagctatcataaatcctctaacagagaagagaagagaaagaaacaaagacggaagagggcaggataaaagaaagaaaaaaggaagggaaaaatgaaggaaggaagttatctattcatttctacagagactctgctgagcagtagacaagaagacttgggaaaaatttaactgaaacttttccaaaaatcttttcagagg

SEQ ID NO: 16 - DNA, 45227 bp, Homo sapiens
  source 1..45227: mol_type = other DNA
cctctgaaaagatttttggaaaagtttcagttaaatttttcccaagtcttcttgtctactgctcagcagagtctctgtagaaatgaatagataacttccttccttcatttttcccttccttttttctttcttttatcctgccctcttccgtctttgtttctttctcttctcttctctgttagaggatttatgatagctaggtaactcattaaggtttctatccagtgtcccagaagaataattcttctttttaataaaatgaattacattttcattccctttccttgtctttttgttttcctgtgttctttttggtttctttcagcagatgataaacgatgttttcctttgaaattgcttctcactcctgctcagacggtcagcatgagaagtcaaaaggaaagcatacacactagtaagagaatcagggcgtggaaaagggtctctaagaccccaacccccaagaaggagatggagacccaaacatgccagtcatcagtttgaggctcatagcttgttagtttagagccagattttgtacttgtagtttgaggagcacagcttgttagaatccagatctcatggcttttaatccagaaatatttctttgtttgggagttgtttttcattgttgctgttggccagtaattacggtactcttgtgaaaaggctgttttataggtcagttatttggaaaggccgttttccgtttgtttggtactgaataaatgtgcttgccttgttcatttggcaatgtcctgagctcctcaatctctcagtcccttcttttagaaacaatggtttgcctacaggatgccaggtgcttttctcagggccctgctcctgttatatttgatttctctgtcaacctttttacactactacatacgcccagagtgacagaaaaaagggagaagagaaagaaagcaaaaggaaacgagaaaaggaagttgaaagcaaaagaggaaagaaggaaggaagggagggtgggaggaaggaagggaggaagggagggagagatgttgaagatcaccagtgacttatacaggaaaattaatgatcagatatcctttgttaaattttaatactggcagtcatgtctgttattagggaatccaaaagtgatgaaaagcaatctcccttccttctcctctgctctccccactcctaccctactacgccccaggttatacttcactgcatctacttggatgatgacataggagtctggcattatgtttccttaaaatttgtctgccttttgtggggtttggttgccaaccacccctcttatcctacctgcaatttcctcattccttgttttatttttagaagaacacacctacccagacactcattcttttttacaagtagtctagttgaaatgtgttgaccttgacccctatcggcagaactgctcagctgacccattgactcttgagaaataataagtagttgtagttttaaggtgctacattttggagtgatttgttatgcagttttattgtggcaataaataactgatacagataatgtggtgatcttgatgaatacaagagtgcctggcccgtaagtagacactcaataaatgttggactggaatgaactggcaaatagagtaaattaatattcatcaataggggcttaattaaatatgttgtgacatagcctaacaatggaacacaatgcaggtattaaaaacaatgaataaaaattcaatgagttgatggcttaggatttgtatatttgtctgtgtattatattacatatcagtaaagaaagcctgtatacaaagcagcatgatagccttttaatattaaaaaatctacaatgtatatattcataggaaagtatctggaagtacatataccaagatgttgacaatggttctctaggtagaatcataacaggttaatttaaaattttttctatacttctttattttatttgaagacgttcaactttattttttataataacaaaagagtaaggtgataagatactcttttcctgagtccaggacacatggggtgagctaccctgatatgacattttctctttctctccccaaagcacaatgaagatcttgaagggcacacagagagagggaaggcaacagaggcaggctttgttggacaccaaatgaatgtactgagccattgttccaagacagctctgtattttaaagctcagcatgggccaaattcaacctctggatgaaatatgtgattcttgtggcattgtcagaagtggcaaatggattctctcctcctaaatgtggtgtgactctcccatcaaccacaggtagcaagtaacggcacacttgccacgacctctactgtctgctttctgtatcactgcctcaatcatgcccctcctcttgccttgtcttggtgaagagtgcctggccagcagccctgcctacctctctcttctggccctagcgccttgctccagcccatgtggttccagcaagctccacttcaaggggcccaccctccagggcatgttccaagcatcaccaaccagagggcttcttctctgagaatttatacatggaccttgaggtcagcaagcaaggatgatataagccagagttctctgcagccatccccttttcacctctctcagttacggatgaacttatctgtaaaatgggaaaaagaaacgacaagagaagcacagctgagagaaacaccaaaagaaagagttgaagacattgtttgaattcctgcatccagtagtgcccaaagccagtgccaaccctggaattcctagctacaagagccaatgaagtcccttttgctttagtttgaggtgggctcctgtcacttgccacagaaactaggagaaagcacagtgtctgtgctgcagtgagagagggctaaagtcctcagggacaaccaataaagcacgagagccaatgaataaatacttgaggtgagcaattacaggaggcattctttacatttcttagagagccaagcaaaatttagccccagttgcctgaagtggccatatatattattattaataatgaatatagtcaataacctgtaggcagctcagaaaaaatctcagtcattaagtgttaaagtacatttgagaccatttgcctcagcatctagtgcagctccggatacacacaacgtggagggcagggaactaacatttggtgagcacctactatgggttaggacctgtgctggacattttcacatacattagttcatctattcctcccgaagatcttggatggtgggtattattaccttcattttggagattaggaaacttgcctaaggttcatacagagcttcttcggtgctctcaatcatgactgttcccttgcatccatcccctctgtaagaactgagattagcgtttagggagttatagctggtgcagtagacacctcagatgccctgtgtcacatctcttgacacatctctgatttcagtgcacttatgatgtggcctctttcccagatctcaagcacgcagcagtcattatttcactatctgccccgggacggtttccacagatgcaggagcttgctcagcctaggagaaagcacagtgtctgtgctgcagcgagggagggctaaagttctcatggacaaccaatggagcatgagagccaatgaataaatacttgaggtgagcaattacgggaggcattctttacatttcttagagagccaagcaaaatttagccccagttgcatgaaacggccaattgccaaattcatccttatattgacttttcctccttcgtgttgcaggctgactgatctctcattcccacttcctggaatcacctcccaaacaaactaactgcatactagtccttgtctcaggctctgatagtgtgggattccaaactggaaatgaagaccatcttgtgtactgactagtgaaggaaaacgttattgttgtgaagtctgtaataaaataagctcagcttaaaccagcaagagcaattccaagctaggaactatattaagaaatagtctcttacatagaaccccctttgagaaaatatactcaaagtctataacttaaacatgcctggaaggaaatacatcaaaatattatttattataattcaatatatcatattattatattaattattcttctcttctgagtaaattttcaatggacattccccagatgttcctcacttctcttatctatcagtcttgatctgccccctggggaatcacaattcttgtcactgcagttaataaccttttttttttttttctgtgactcaaattaggtagaagatacttagccatcattctccacttggaaggcagcacagcatgttagttcagagtatggtgtgggcaacaaaagaaggtcaaattctagtcatctgggtcacttggtctgtcacccaggttttgctgtggaaacaaacaactgcttgtgatcattaatttttaaatatggactaggctaagggataccgagatagctggtaaaacattatttctggatgtgtctgtgaagatgtttctggaagaaattagcagactgagtatagaagatccacccttaccaatgtgggagggcatcatccaatccattgagggcccagagaggacaaaaaggcagaagaaaagcgaatttgctctctcttctggtgctgaaacatccaccttctggctggcctttgaacttcaggacttatcctaccctagcacacccaccctcccaattcccccatcccatttctcaggccttcaggcttgggctgaattataccactggctcctctagttctccagctcaaaaacagcagactgggggactactcagcttccataatcatgtaagccaattcccataatgaataccactcccccactctgtttctcttgagaaccatgattaatgattaatataactccaaaacttagtggcttaaaactgcaaagattaatgcatggcttatgcagcatgcacatcttgatgggggtgggaaagggggctctgcccatagctcccactataggacctagcctgcagagcgccactatctggaatgttagtggccactgtggcagagtgaaaaggaggcaaagctcatgcaaagccttccatctgaaagtgataaacgctgcttgttcatgtttcattggccaaagagagtcatgtggtcatgcacaagtttcactgaaagggaaagggcaatctgccttgcagataagaaaggagaaaaaaagggggagattttgaaaatgattgtccgatttggacaatcatttaacctaagcttcagtgttctcatcatgtactgaggggatatccactttacaaggttattatgagggttaaatgtgaaactgtaaagtacctggcacacagccattactcaataaatgctgctattttgacagtgatcctttgtttacctgaaatataatattaagatttactccaatctttcctacatctctgggagtaaaaaactcttgaatctttttctggaggttgcattttctagtctttaaaaatgagtccagtgccttttccctgaatttctccaaattctgaccattctaagatatgggttctagctcagtgctcctcacacagaaaggttctagtaaggaatgagaaaatactttctgctttaaagaagagctacgcaaatattaaatgagaataattatatctattatttatggcgaatattattctagtactcagaaaaactcagcataagttcattagaacagtatgggccacattagaaagaacatattatcattatgtttgaaaagctaggactgggtacaaagttactacgatcgtatgggcttagttggccaagtatgttattacagtttcaatggaaccatcatcttgtcaacagaacacacagtgaaacctgcagggccttcctctggcttcatgacagtgagtagactctcgctttccctagggaaggcaggggcctggtagggtctgagcaagagcctgaggcatagactgtgcccaccctccccttctccctccactcatgccagtttttggtttagaaagccagcattttgaatatcaagtctcaagactttctcattgtcctcagggtgggttgctgccccccacaccctccttgttcccatatgaaggtcattgacccctagttttgtaaggtgtttattcttgcagaatttggaccagggactttctgttcagcaaatgattcagtgcatgtagaccctgaggttgtttacattttcaggaactgctattgcgaaactaaaaaggtttattttacgtagtggggttgcttttgccagatgaattcatttgctcaagttatttttaaaatgtgctttcccttagctccttagagaagctctggtctcttgcctgtgtgggtctaggccagaaaaaaaaaaaatgttgaggctattaatggaagccagagaaaatgtctggccaaggtggatcaaagaaggttctcagttttgaccccaaattttaactttctgaatgccgggctagcatactagctggtcctggctccagcagcttaaatgactcatgtgcctagaaccaggaagaccatgcatatgagtttcaaactgctcctacaggtatgtgtggaagggggacccctatgacagaatattcatccagaagaaacttgccctgctgccaattggaagtgccacagtccagcagcagtgagactgctggaagcagtcagattgcagagcacaaactctctaactcatcggggtcaagtggcctgaaatgattcatcaggctgctttgcaaacattttatttaacaattgatatttagaaataattttttatgacagtttcttatcttttgggggaatcagagacccctttgagaatctgaggaaggctatggagaaatatctgatgaagcctgtgggaaaaaaaactgccatccagaaaaatgtatatatgcaagctgtcccttaaaatgttagtggtatcattgggatgacatccaaaaattgtcagggaagtccgtaaatccccttgcttcagaatttggggaaactttaaacctcagattaatggtatgtagatactattcattcattcagagcttactgacttcctgtgtcatggcaagcactatgttggaagctggaaatacaatgatgtataagacaaggacacagccttgtggagctcacagtctaatgggagacaaaacaaacccataataatgatgcatgataatgagttaagtgctatgctagaactgtaagtgtagaagcaaacaagagccccaagtagggtaatcaattcaatatatatttaataaatgcattacgtgccaggcagttgggaataagctggtgcatagacaagatccctatcccatggagccttaagtctggaatactctcaactaaaagttagaggaggggcctggaagaacatgatgcccacctaaggtgaatcctaagtaaagttcacccaggtgaagtgggtaagcgtattgcaggtagtgggagcaacacgcacacaggcccagtaacagcaaggtgagtcaggggaaactacaaatagttcatcagggctctccatgaaggcaggagcagtgagagacaagggtggagaggtgtgctgggggcagatccccaaggctcctgtgcttcaccatggattgtgggttgaaggttgtcaatgagggctttttttttttgagacggagtctcactctgtcgcccaggctggagtgcagtggcgcaatctcggctcactgcaagctctgcctcccgggttcacgccattctcctgcctcagcctcccaagtagctgcgactacaggcacccgccaccacgcctggctaatttcttgtatttttagtacagatggggtttcactgtgttagtcacgatggtctcaatctcttgacctcgtgatccacctgcctcggcctcccaaagtgctgggattacaggcatgagccaccacgtccggcctcaatgagggctttttaaggcaagtcaggagtttcctattagaaagatcactctaccataaatggagaaaattgggcaaaggggaggggatggctagtgggtgaaatcatggagactagaaggaaggaagctgttgaattaatctagacaagaaatgataaggtcctaatagtggcagtggagatggagtaaagtggacgatgggaaaatgggatgaggcctctggagagcagctcacaggcaatttttttttcattccctacaatgacatttgcctacggcaacacactctgccacatgcaatgaggtagtgactggctcaagctaaggaaataatcttgttactgacgtggtatcaccgggaatcatggctgtataactgtagtttcataatcaaattttggaactctacatttaattgcttaatggtgatgatgattatgacaggaataatactgataatagctgcaacccaattttattggacacttattctgtgctagttactgttccaagcattctgaatttactaacccacttaatcttcaagtgactctatcgggtaggttctattcttactcttaaagaatagatgaggacactgaggcagcacagacaggtttaataccttgtctaaggtcacacagctaggaagtgagaaaataaggatctgagccttggaaatctggttctaggacgcaaacttccaaaaattctcctatcaatttacaatgacaaacataaattatggtctttctccataaaactcaatttgagcactaaaactgactttttaccatttgttatgaacattctgaacaatcacaataaaaagtagtgcggagacactattcaagtctctaaaaacatcttaggagtggtacatgaagcaaaatgctgggtgtgagtgtttttgcagattcaggctccaaagaacaaaaaagcagaaaaaacaaacaatggtgtttttaaacaatgaatgttgttttcctttagccataagggaattttaaaacttgacaaactcattcagctttcaaagcattccacattccccacccacaagcaaatgccagaaggtgccagtttgagccaactcagctcaggaatgactttctaaatactggatcagatttcttgaatgtccgcgctccacagatggatacttactattgtcctaattggtctgatgaaaagtacttagcaatttatcaagcaattaatttaacaaaaacatttcagcaagagatgagatggtgtggcacaaatgcagaaacagaaatttgaaaagattcaaatgtattacttcaaaaagattgaaaaattgctgcctaaaatctttgaaactttagagctaggttgtgcataggcttaatttttaatgaagaatcttctgggaaaataagtttttgattatataaagaaagcaatttccttgatttgcaggaaataattctttttggggaaaaacaaataaattaatatttaatatactcattacatccatccagctaacatttactggaagcatgctgtgtgcctggcaccatgctaggcactgagacacaaaaatgaaaaagacaagaatcttgttctttagcctaggtggggagatagataagcaaaggaatagtgtaataaatgcaataaaagaaatacgtactagctagacctgtgggaagaaaggttagaaagatgaacagaaactgtgctagaattttggacctaattctgtaagtgttggagagccattaagcagaagtgatcgttagatttaattttagaaggatcatgctgttatcaatgtgaagaatgggctgtagtggggaaacgccaaaggcagattctgttccactcttcataaaaatcgtaccacagcactctgataccctttttgctctctaatccatttctcttttccccccaacacagataatttagaaattatttagtcttttaaaagcgctggtgtccaagtttttgaggttttcccagatatttgttattggttaataatttaattccattgtggtcagagaacatattttctatgacttgaatccttttaaatttatcaagatttgtttcatggctcaaaatacggtctatcttggtacatgtttcatgtactcttggaaagaatgtgtgatttattgttgttggggactgctgtgctctacaaatgtcatttaagtcaaattgtttgatagtcttgttctaatcttctatatccttactgattttgtgtattcttgttctactaaacattgaaaggatattaaaatctccaggctgcgtgcagtggctcatgcctgtaatcccagcactttgggaggccgaggcaggcagatcacgaggtcaggagatcgagaccatcctggctaacacggtgaaaccccgtctctactaaaaatacaaaaaaattagccaggcgtggtggtggccgcctgtagtcccagctactggggaggctgaagcaggagaatggcgtgaacctgggaggcggagcttgcagtgagctgagatcctgccactgcactccagcctgggcgacaaaaaaaaaaaaaaaaaaaatctccaaacataattgtggacttgtctacttcttacagttctatcagtttttgcttcatctattttgacacagctatgaggtgaaaaaacatttaggactgttatatccttttgctgaactgactcttttatcattataaaatgatcatttttacccctggtaatattctttgctctgaaatctattttgtttcatattgtcactccagttttcttctaattaccaatatgatgtatcttttctccatccttttacttttaatctgtttgttcgtcctttatttttaaggtgtgtttcctgttggcagcatatagttgggtcttgcttttttatctgatctgaaaatctgattttttaaggacatttctaaaattgaaaaataaaagttgtatatatttatagcatacaatatgatgttttgaaataagtatacattgtgaaatgactacagttaattaatatatacattacctcacatatttatttgtagagagaacacttaaaagatactgttagcaattttcaagtgtacaatatatgttgttggttatagtcacattgtacaatagatctcttgatctttagcttattcctcctatctaactgaataagttgtacaatagatctcttgaacttattcctcctgtctaactttgaccaacatctccccagcccaccgcctctccccagcacctggtaaccatgtttttactctctgcttctatgagttccaagtttttcaattctgtgtgtaagtgagatcatgtggtattaacaatctctgacttttaattggggtgttttgaatgtttatatttaaatatctttaaaagataattgactgtataagtaaaattaaaaaacaataaagtgtggagtttataatgtttgtagaaataaaaacgttaagaccataacagcaaaaagacaacaacagtaagtttcttaagctatatgtcaagtagtatataaactggttataaactggtaaattagaaagaggtataaccctaaaacaaccactaaaataaatcaaagagtatagttaataagacaatagaaaagacatagtagaataaaaaaatccaaaagtaaggagaaaacaaaaagaacaaatagaaaacagcaagatgacagctttaacctaccatgccaataatcatattaaatgttctaaatgccccaattacaagctggagattgtcagattggatgaaaaagcatttatgaagcactagtcaggtactgaactaaggatcgtataaggtctcattaaatcctctggtgaagtacgtattatcactccatttccaatatttacaaaatgaaccttgcataggttaagtaacttctccaagcagcacagcagggattcacactcgggctctgaatagtgcaagtagacctgtaaaacctgcttccttactctcctttcaattcagctacactgagtaccagttacatggagttactaagttaggagctgtgcccatggcaatgactgtaactgtctgggatgaaatccacctttaccagctgtgtgaccttgggcggtgtattacacatctttaagctttagtttcctcatttgtaaaatggaagtaataaaactagtcccatagtgttactgtgtgttaaatggaggtggttgactgtttttgttactttaagctataccctgcagatcataggagaaatatcaatttgtgcaattctacatcaaaatcaaaatagtattatataagagtgatctgtttaaactgtagcattatagaaatatactatagaaggaactattttatatttactttatagtattatatgaagttttggtttcttctttgagaatcatagtaatgtgatcagttagtcttcttttaaagaaacctctcatcccaactattctattttcaaaaaaaaactttttcttggagtgaaaatgtcaaacctattcctagctttgcagatgaaagtgttcagattccttggatttttactttggatacatgtattagatacctgggatgaataacttcagtttaggttatattaatattataataataagaatgtttaaaaacaatttatctaaatagtattttacatttgaaatattaatatataatttgaaaaatcaaaatgaaatccagagagttaagcagaaagtttttttaacataagattatattataaagcttctttaaatattttttctttgaaaagacaaaattaattttaaaaaaagtttagatccagcatgactgtcagctgaacagaagctgatcagtcttcaaatatcatagtatttttttctgaatgaacaactgaaagaggcaaaatttcaaatatattttattcaaaattctccatttaggagaaaagatatataacaatgtttacacatgctttaataacttatttcactgtacaacttacattctgtataacagtacaataaaccagccaaagaaaataaccagttagcacttaaataagaatctaccatgtaaaaaacacagtatgggacactacaaggtagtatttatatattttttaaatgactgagctacagtacaacagtcatctagttcagtggttgtctaaaacatcaagctgtccacatctttctgattcatgatgggaaagctattatgacctttcacattcgaacatgtcattttgttgtgtaaatttggtgggtggggggcagaagggctctattacctttatccctttcttataaatatattttcccttttatattacttccagaattttaaataaaatatttatttgtgtttgtgtaactacaatgtcaacattgtgttagaattatattaatcagttattttatagccagcaaaatggtccaaacgcattaagaaaacaaaagataacttagctctgccaaagtagcacctaggaaaacagcacttcagtaaaatttctcctgctattccttatagcctattgcaggcaaacagcaacaacttcaaaaacataggcagaaatgcaagaaggaagtactcaaggaactattttctgtttctgaaaaaaagatcttattagttagtatattctctaaggcattttataatctcagagttgcaatgattgccaaagcaggtacatggtaagacttagcaagaagaaaacaagatgaaaatgactgaccagtgaaatctgaacttgttccaagtaattagattttctaaggagaaaaaaggcacaggaggtgcacatttcaatttggctcaaaaataatgaaaattaatttaaaaagttggcaacaattactaaaacataaaatacaatttccttttacagagctcaactacatagaatatcaacaatagcaagaacaataaaataaacaaaacaccctaactgtggttcaccaggaacaaggactatagagaactattagacatttctacagactgaatcccagggactaaatccacaaagtaggatctaataatcaattccaattaaacatctgcttgatcaattttctttctaaagctcatcctatgttcaagctcactttctttctgtggaattgaaatcatttaaaggctctagttttcagttgattgcagaagtattacagtaattctacacaccaaagaatgccaaaagatagaaagtcaactatctgtaaaagccaactcagatttcaccttgacacatgtaaaccatgaatcatgtatttcaaaaaaacagtagttgtggtcaagtttacatcctattattatatctttaaaagatagcaataatatttattatattgtaaacataggtctgtatcccaaaagcataaatctaggaaaagagacacccaatgtaatgatgcacctgacatcccctcacaggctcttgtgagaactgtagtgtaacttacttaactgcaattgctgagagcagaattctggagtatgatccaggggaacgtttccccacaccactgagctactttaccagcgatcatgattgtgatggaataggcttattaagttacacatttaaaaagtcattagaacatctcgttcttgcacactagtgtagaaaggtcttccaaagataaaagagtgtaggcctggtttaattttctcagccagagccattattatgttaagatcgccctctgctgttaaatcaaggtctatcttcaggttccgaagagatttaaagggcttttttcccttctgcctaaaaataatggaaaaaaaaaaaaaaaaaaaaaaaaaagaagcgcaaaaattatgatatagaaaatgtacaaaggaaacaaaacaaaaaaacaatgtacaaaggtttttcttccgtgtaggagttttactcacgtatcgtcttctatatattttattagtgtcaaggcttttctgtgaaggacaagtagaaactgtgcaaggaaagtacttctgagagataagccaggtttcagctgaaagacctgcagggagaggaaccatttcaacacataatttgctcacattctactcgtacagaagtttctatgacagtgttgacagtgcttggcagacaatacacactaaacatctccttaaccatttccactgatgccccctaacaggagtgtggtatagaagcactaggtgtaggaacaatctgatatttttttttttttttgagacggagtctagctctgtcaccaggctaaagtgcagtggcgcgatcttgactcactgcaacctacacctcctgggttcaagcgattctcctgcctcagcctcccaggtagctgggattacaggcacacgctgccacgcccagctaatttttgtatacttagtagagacggggtttcaccatgttggcaggatggtctcgatctcctgaccttgtgatccacccacctcggactcccaaagtgctgggattacaggcataagccaccaggcccagacaatctgacagtttttagaagttttctaatttatctttaaaaatgcattcaaattttgcattctacttcagaatacatccatgtttacttcacttttaaaactcatacataagttatttcgtattacttaattttttctgcccaaatcttcaaataacattgaagctcctagaagatgagcctatggttttgagacattcatatacctgtacttttgcagggggtggagtgggtgggtaggagtagaatgtgtgcatatgatgaggtggagagtgggagggattttatgtcagcttgagaagcatgaaattccaggcctacgaattttccttgaacttcgcaatatgtcacagacctcatagatctcaatccaaaatttctagtaaacataaggatctcattatttcaaagctttatctatgacacagtttcctggcctgatccccagaatgttattataacaaactgtaatatattaagaaataagttccatataatctacgatttccttcaactgtgtaattaagtagatattttttaaaagaatgaaacaataaagatgttatttaaataagtacactatgtttcaaaaatatttttgagtcatttcaggcaaataaacaacctccctttctcaaaaaaaaaaaaaaaacttacttgttataggttaatgcttgaattaaaatgtttgttgtttgacgtatggaatgctgcactcttaattgttaatatacaggctcttccccattaataagtcaaaaggaaaaatcatttagacactttagaaagaccagacactacaaaaagcacctaataaaacagattaggactcaattcttaattctatcattttataaatgttaaaatatatataaaaaatatattacactctatcatagagtatatgttatatattttacatatcatatataacatatactctacataacataatagggttttaagtttataacttttttttaatatataaacatatatatatcctacaatgctggtaatatgtatatatgctcgtactatatatatatacacacacaaacatatatatatacttgtactacatatatagtacaagcattgcaggatatatatatgtatatattatatctgtaaaagctaagtcagatttcactttgatacatgtaaaccaggaattctatgtttcaaaaaacagtagttgtggtcaactttatatcttattattatatctttaaaagatagcaataatatttattatattgtaaacaaaggtctgaattcccgaagcataaatctaggacaagaggcaaccaatgtaatgatgcacttgacatgccctcacagactcttctgagaactgtagtgtaactaacttaactgcaattgctgagcagaactctggggcatgatccaggggaatataaatatatagaacaggcattgtaggatatattaaaaaagaaaacatgtcatatcattcactctgacaatctcaagttcaacatttacctgatccaggaaggctttcactagagtgtctctgtgtaagacatcttgaaaaatattcctgaagaaaagaagaaaatgaagaaaagaaaaaagttcaaatgttgaaatggccatataatgctaccttccacaatccctcacttgagccaacattttaagttcttataaattgatattacatataaacacatttgtaagaatatagatatatatatttggagacacaaaatatacattcatttatttactcaaggatatatttacattttactggtgtttgtcaggctaatatgtaattttttctctaaagaatataagcagtccccagtaagggtatgtatgtatctatcaatctattttactactctcatcttttaaaaaaagtagagacccttaggcaattaataaataaaactaccaattcttgccatctcaaaaaaaaacaaaaaacaaaccagcaacaaaaataagccactaccatcaaaaaccaaaacaaaccaaaaaatgtgaagaaaaatttgagtgagattagagaacacactccgatgattatccactgggtttgcctcaacaagcccaccatctgtaagtaacatgaaccaactatccaagaaagtactacctaccttggcaacgaccagagtgagtagtagtaatataatggccacttaaaataatgtgtgcctaacacagcacctaggatatagcaggtgctaaagcaaacacacaaacaaacaggactacttattcccttcccaggccccacctccctttcatctttttctcttccattttccctaggttctactcaggccagagggtaagagaacatttagtaagaggaggagtttttaactgaaagtggtagggatcatcctatacctgaccagagtggcaaaaaaagagaatgggtatgtgtagaagcaaacaggaaggtagttcaagtttccttatcttaagaaacgagtgtaccacactacagaagaaagaaaccgtaaaggggaaaaatattagcatttcgtcattattgactgggcactgatagtgccccttcttgggctctggaaagagaataaggcttatatttaatcgagtggacttattatacctgttccactgaatgagtatcttcatcataagtgaattagataaagcaaggtgttaaaaaagaacatttccatttgtttgtgtcatctctgatttctttcagcagtgttttgtaattctcatagagatctttcacctccctggttagctggattcctaggtattttattcgttttgcggctattgtgaatgggactgtgttcttgattttgctctcactttggaaggtgttggagtatagagaatgccaaaactttgctgaaatttttaacagatttaggagtttctgggcagagactatgagattttctaggtacagaattatactgcctgcaaacagaaatagtttgacttcttctcttcctatctgaatgtctttctttctttctctttcctgattgctctggctaggacttccagaactatgctgaaaaggagtggtgagagtggacatccttgtcttgttacggttctcaaggagaatacttccagcttttgcccatttggtaagatattggctatgggtctgtcatagatggttcttatttttttgaggcatgttccttcaatgcctagtttgtttaggattgtttgtgatttttcttttttgagacagggtctcactccgttgcccaggctggagtgcggtggcatgatctcagctcgctgccaacctctgcctcccgggctcaaacaatcctcccacctcaacctcctgaatagctgggactataggtgcatgtcaccataccaagctaatttttttttttttttttttttgtagagatggggtttcaccatgctgcctaggctcgtcttgaactcctgggcttaagagatatgcccgccttggcctcccaaagtgctgggattacaggtgtgagtcactacacctgacctactgaaggtttttaacatggaggatgttaaattttattgacaaccttttctctacctattgagataatcttgtggtttttgtttttagctctgtttatgtgatgaatcacacttattgatttgtgtatgttgaaccaaccttgcatcccagggataaagcctacttgatcaaagtagatcagctttttgatgtgctgctggatttggtttgctagtattttgttgaggatttttgcatctatattcatcaaggatattggcctgaagttttcttttttctgttgtgtctctgccaggttttggtatcagaatgatgctggcctcattagggaagagttcctcctcctcaattttttggaacagattgagtaggaataataccagcttttctttatacatcaggtataaagagatgacacaaacacatggaaaaacattccatattcatagataggaagaattaatattgttaaaatggccatactgcccaaagcaatctacagattcaatgctattcctataaactaccaatgatatccttcacaaaaccagaaaaaactgttttaaaattaatatggacccaaaaaggagcccaaatagccaaagcaatcctaagcaaaaagaacaaagctggaggcatcacattagccgattttatactaaaaggctataggaacctgaacagcagggtactgttataaaaacagacacatagaccaatggagaatagagagccaagaaataaagccacacacttacaaccatctgatcttcaacaaagttgacaaaaaacaagcaatggggaaaggactccgtattcaataaatggtgctgggataattgctagccataggaattggagtgaaactggaccccttccttgtgccatatacaaaaatcaactcaagatggattaaagacataaacgtaaaatctaaaattgtaaaaaccctggaagacaacctaggaaataccattctggacataggccctggcacagattttatgatgaagacgccaaaagcaactgcaacaaaaacaaacacaaatgggacctaacgagctcctgcatggcaaaagaaactatcaacagagtaaaagacaacctacacaatgggagaaaaatatctgcaaaccatgtatccaacaaagggatatgcagaatctggaaggaacttaaaactaattaacaagcaaaaaacaacccaccccactacaaactgggcaaaggacatgaaaatttttcagaagaatatatacagacagctaaaaagcatatgaaaaaatgcttaatatcactaatagagaattgcaaatcaattctctaggaatggctattattaaaaagtcaaaaaatcacagatgttggcaaggttgtggagaaaagggaacacttatacactgctggcgggactgtaaattagtttagctattatgaaaagcagtttgaagatttctcaaataactgaaaatagaactaccattcaccctagcaaccccattattctatatgtacctaaaggaatacaaatttttctaccataaagacacatgcatgtgtatgttcatcacagcactattcatgataacaaagacagggaatcaacctaaatgcctatcaatggtagactggataaagaaaatgtgatacatatacaccatggaatactatgcagccataaaaaccagatggagctagaggtcattatcctaagtgaactaatccaggaacagaaaaccaactaccgcatgttctcacttctaagtgggagctaaacactgagtatacatggacacaaagaaggaaacagcaacaccagggcctacttgagggtgggagaagggtgaggatcaaaaaactacctattgggtactatgcttattacctgggtaatgaaatcacctgtacaccaaaccctcatgacacgcaatttacctgtataacacacctgcacatgtacacatgaacctaaaataaaagtcaaaaaaaaaattccagtgaccaatttttcatgtattggcagtgactggaattattttaaaaagttaaaattaaaaataacaaacataattaacatgtaaaaacatatacttaaaagtaaaatgactctgtgacaatagacttaacacacaatctagtggctgaaaatactattttttggacaattttatgtttagaaaatttagagctggatgcaaaatttaaaaattcaggatattattttgtcatgatcagcaaaatgagaatagctgtctaactgtagtttgtcaaatcagcaaaacaaacatagctggctaaaaatgattaagaaatgttaaaatacacatacatcctctaaaaaacaaaacaaaaataccaaatggttgcaaacccattctgcagttcactaaatttcctcaaaaaagctcccaagtaaccaatcaaaaaacggaaaaaatactaagcactttaggaaaaaagaaaatgtttcaaggcacagattaattagaaaacttctacatgtctactaaaatttaccaatatataaaaacttactgacatgtaatttcagttggaccaattcattttctaaaacattcccctactactttctcaagaaccaataaaaactctggagaactaggaaaaaatgggtcctatattaagtcatctttctgcaccttgagatgtataaggctgggggtcccttgaacaagatattcctattctatgcttttggttaacacttactgtgtaattactggtgctccacaggtctgttacctaagctcaaactgattctgtagatacataggtcaggcttatttgccccaatttttctattgccttacacacttagacctgggttattacagttaacacttactgttaccttctatgtgccaggcattattgcaagcatttttttttttttttttttaaataagacagagtctcggtgttccccaggctggagtacactggcacatcataactccctgtaacctcaaactcctgggctcaaaagatcctcctgcctcagctttcggaatagctaggattacaggcacacagaaacacattccaataattcttttttattttttgtagagatggggtttcactatgttgcccaggctggtctggaactcctggcctcaagtgatccgcctgccttgcactcccaaagctctgttcttacaggcatgagctactgtgccttttttcaactgataaaagagaaacacaaaagtatactataattcttttcctgatttcagaacatcttttaagtgtttacttagggttttaggattatagatttatcatcatcattttttttttcaagttgggtccatgctcaacaattaattatcattacttttccttttgaatttactgttcaggcttttttttttaaaaaaaaataagaagtgaataacaatataaaatgcaaagtaaaaaaatgttccattaatatattttaacagttttgctgtattttatattcatatgtcaagaaaaaaaagacttagaattacttctttggttttgttaataagtccattcaataactgttacataatagactatacacaatgtaggggctggggctggggctgtctggttggccactattaagcccggtacctagaacagtgcctaggagctcaatatatatttattaaacaaatagttaaatatttactttaagggttaatcttacctattttagggtaaacacaattgtatggaaaaagaagaacatttaagaaaaaaatgcttgattaaatgtttcttcaagcataattctgctggtaatatttctttctttttaaatgcaacttctgttttgtttttattcgtaaaagacacaatttcatattgcttgactacagtaccagcaggcagagcattacgtacaaatcaggagtaaagctttcgtcagtgtagatgatcgtatcctgagccatgtcttcttctgaagtggctctccagaaggctgtcagctcggatctcatgtatctacgctgattataaatatgttcatgacagggtggcatctgcttcacagtattgacatccacatctatgtgtgtggtgggatatggagcatacatgacttgccggaaaggcagcacaaagcttccagttgaatcctgtcaaaataaaaggaaaatttactgtcttacatgccaaacgatatgaataattgttttttaattttaaaaaatggtctctgatttagcaaatccatctctaaaaatttatcctaagaagctattcatgagtgtgtgcaaagttttagtgacagaagtgttcagtatagcattggtttcaatagcaaaacatcagaatgacctaagcatccaaaggaagtggttaagtaaataaaaatgaatttattatttggcatctatagatgaagttgttgaagtttgtgttgatattcaaagaggcttagaatctgctgtgaaaaaagcagattagaacatgcagagatgatccagtgggggtgggagtcttaaagaaaatacatgcaaaagggaaaaaaagactagaaagagatataccaaatattaacagtgggtattcactggattcaaaattacaagtgtcttttaatttcttaattattctatgcacctcaatgagtatgtatttttataaaacaaatttacttctttcctaatcagttggggtagccagttaccatgtaataataacctactgcgtatgaggcactgtgctatgaacagaacagaagaaagaggctatttccatttttttactattataatgctgtgataatcatctttgtataatgtcaaaggtattttctggaaaactatatgatttgtatttgcatggagaactattaaatattttttcattagatcatagttttgaaatttcctctaggcatctggtataggtccctttcagaactaaaattatataattaaatgagagggtgctgaggaaacaaaagtattaagcactttattatgcctttaacaggagaagttctaatttacagatatgtataactcaaatagaaactacgtttcctttaactagtttctatatttaaatactatcattctgagttcatagcagcacattattgaaaatgcacaaaagcctaatataacttgtatttgcaacaatttttaaatttttttatttcattttgccgtggctacatcctcaagaaagtagtcactatgagacaatcacataaccattaggaaagctatttcttcacgtcttgggactataattgaaataacaataatagattcaacaaggtgaacaactttcttccctttaagtattataaataattgctaatttacatttctctgttttgctccttgacagtagactcaaataaaagaaaaatacaatttttttctaatatatattatatatagaaatatatatattttagtacacatacataggaattgcttaaatcctataagcttcttaaagatgtttaaaattttttttcaataaaattcaaatctatttagttaaaaagaaatgatcttatttttgatgtgcaacctgatttaagcatgtgttaaaaaaaaaaaagtcctgaggctagacatgtaggaacagggacccacctggaacacaaagggtattctatggtgtttcactgatgatactaactataaatccataagacatatagtctatgtgcagaactgtgtaaaggaagtcagtctctgggcatgtcaatatgagatacattaaatgctaatatttaagatttgtctataaagagtctcaaaaatgattttagaaaagtggtttcacttgtgataactagaaactatacctttagcaggccttgtacaaagagccctgactcatatttaaatgatgattctgcttcacataacctggagcattttctctctgctggagtcagaaaaaggcataatgttctgactatctataaaagaaaatattttagcattaaaacatgaagtaaaaagaccactgatttgcttatgaaagatatctgaaattttaattgttattatcaataaaacatatcctaagaaataagtattctttagtcacctggaatccatgggatgtaacagttgttgcttaaaatagggattctgtggtcaaataaatttagaaaatgcttggtaaatttactgtatggcatctcaaaacctttaacatttggctacatactgtgactcttcaggtgaattatatcatctgcagactttctcagacttatttgaccatgcaacttttatagcttctgtttagtgggtctacacatgaaattcgttgtaagaaatatcaaagaatgtccagatcctccaaaaagaagagaattaattattgaatttgatttaaaataagcaggtcattgggtgggatttagaaatctgattctaataatatttgacctacagctctattaggaaaaataaaaaggcatgtaactatcttgaaattcaaaccatatccacagttattatgttaaaggagtggttttcaacctagagtggtggcaacttctttctcaaattaaaacaagataaaaggtaagctattctccctcaagaggatggaggatgggaaaaatgtttaaaaaaaaaaaaaaaaacactccaactatggagcctttctcccttcataaagcagctcggcagtcactctgtgcaacctaaggctttggagatcacagatggaaagccacctgtttgaggtaacagaaggaataaggtcactagttcgtagatgcaatataatgacacaggtatactaagctctcataaatggttatatgagaaatataaattaaggctcatgtaaatatacaaagtagctgattacaaaaaaaaattatgaatatctttgtaaagtatcatttccaacatatttcctatgtaaaactttttttaaaaaattaggtttgctgaaattgaaagatacacatacttatctctgaactctttctaactaatggtcagtgaagaaaagtgcaaaatcctttagtttattagctaatgcttggaaatgtaactgttcattaatccttaattaactcaagtagcactgaaggaaagggtcagaaacattactgaataaagtataataatcaatgaccacttaatcccaatagctccctagaagggacagatttagaaggaaagcgaagacaatgaaatcaagatgaataaacaaataacatttctttggaactactaccaaaagtacatgactatcttcagatttgttaaagataacattgggaaatagaagagtaattttttttatatatctgattttaatatattctcaaaaccatttatacactactgacactggtatttccgagctatcaaaataaactgataaatgattcttactcagtttatttcaaactcactgttgccacaaggtgtcttagcaatttgatgagattacattgcctccttatactactagatcattttaattgcaacctaccatttaaatgacaatccatgatatatcatcagtcttaaagagtcaaatcatttgctagattataaaataaactaccttatttactttctctgcactgctacctactacaacggaacagccacaggtttgcaagtgtgagctgatggcactgtaagttaaagaaaacagattaaaaacattgcctataaaacaatttaacaaactaaaaacaaaaaaaagtaggtgagctcttcaaataactcagaatagctttatatgataaacaccgaagctataagcacaatgttatcttttatttgtataggaacctacattttctagagacctttcacagaaattttcttattgagccttaaaacagcccaattagtcagtataatatcatttaattaatgtatttatttattgaaataccatcattttatagctgaagaaattgacatgtagagagattaagtgacttacttaaagtcaaatgggatttaaaatgatgtatgaaaggctgacactgaacagatacaggactaaagtgcttctgattcaagccattaaggctcttaggttaaacacactcatgcctctgatactccatcatgagcctaaaggaaaagactgtgaacataaaagtgaatactttatacttttacttctcttttattaaaagtaaaatttcatgaaaatctgtaactgtgaagaaactttaaaacagaatataagataatacatgtaaagcaactagtaaaggaactaacatgtaggcactcaacaaatactggctatttctagaagaaatgtaaataggaaatgttagctatgagctattattaagtgtttttatgttccaggcactgttctaagtgctttatattatttatcttactcaatgcttataacaaccctacacattaggtactattactattattgccattttacagatgaggaaataggtgtatagagaattcaggcaccttgcccacgggtacacagcattaatccagggagtctggtttaagggcacaaactcttaagtactaaactccactgctggatggaaaaagatcagtataaatatgaataattttgttctacgcctaaataacttaagttcatctacagtacaacttaatatgaaaggattctgttagctttaatgagaagtaaaacaagaaaccagaatcaagcaaggggccatgatttcttgtctgggatggaaactcggtttctttaaatagcaaatggaataacaccaaatatatatagaaatataatgagtgaaaaataacacaaatttaagcaacagttcaaatacgtaatgtccctagaacaatctaagtagacagtctgttattttctttcttccaaatcttgtcataggtgagcataagatggtatctgcttcatccagcttttatgaaaagaaaaattcttacttgagaagaaagccttcatgacagctgtcaccaatatcatcatcattgagtactgtatcagctatctaaaatgcatcaaaaaataaaaaaattagtctggctgtaacatagtgttgaaataacacttttaatatacaagttttcggaagtctggattcaatataacacactgccttcatttccgagaatcaagactccccaaaaaacaatctctgtgcactaccataaacttcagaagaacaaatgtgaaagctggtcaagcaggttaaacaatttttacaagaacaacttcctcttctgagctgtcagaatcaggagactaacctaaatgacaaaatcagaaaacaacaagaatagtttcctaaaggtatctcttaacactcatagtgtgtgattcaaaacgtcctcaacaaatgattaaggaaactaaatttgtgactacaagtaaacttccattaatggttactactttggcacacagttttgtttcaaaagacactacattaaatattaattgctcctataagagctgggatcctcccacttttaggaattataaaagtaatgaaataaacaaaatgaatttaattttgtcatcactgatcaaaaatgcctctgttttgccataaaatccaggattttgtgtgtgcttatttgctaaagtggctaatactgtatgtgaatagtatgtatgacaaagtccttactattaaaattagaatattaataatatacataataatactataaccccaaaaaactcataaagtgtataattgctctcatttaaacttacatctatttcttcaggaacactgtgtgatttcatagatgaaagcagttccattacaggaatcacttctccagtaagcattggaataatactctgaccctgcacaataaagtgacatgaagtgaagaaaatcacgtaatatgagagaagctgggcaataaaaaataaaaataacatcaaacaataacattctttgatgaaaatacttcgtaatttgttcaaacacagtatcaaacaagtctactacatgtctaaaggatttatatgcaatccaaagctcacttttattctttcttttctttttttttttttgagatggagttttgctttcattgctcaggctggagtgcaatggcgtgatctcagctcactgcaacctctcctcccaggttcaagtgactctcctgtctcatcctcccaagtagctgggactataggtgccgccaccatgcccggctgatttttgtatttttagtagagacggggtttcgccatgttggccaggttggtgtcaaatttctgaccatgcccggccctaaagctcacttttattctttagagagtatggaatcattggtttatcgtttactgttacatgcaatgattaagtcatcatgcctcttttagaaaagatctcctttaaaatttgagataaaaaaaatttgttaaaggtcatcaatatatttcatatttaaaaatgaggaaaaccaagcacaaaaagactttgaaatccttaccaaataggtaaggaaaacttgaatcaatacctaacctccatactcataaaagtataatctacccaaatgcaaatcaaaatcagcacatatattttaagaatcaataaaacagaaaaattccctttagagctatttcaagatattactacttattacatcttgaaattgtaattttgaaatttgtagtctatagaatcaaactgaaaattcagtataacacatcacaaatgtaaagtgtctcaaatatggatggtccctcatttattcactaccaccaccagtctcatcagttttgtgaccaacttggttaagtaaattttttgagatataaatgaaattgtcaaatgactatgcatttttagctaaacatattttttaaatcatacattatttaagatgaatttaatactagttgtttttcctcacttattttatgaaatgattttactcaaagtcttcataagcatctttaagttagaatctttgtcagacccagggccatttttggagtaaccttaaccagtttttcagagccccatattattaagttgcttgagaatttaaatgtgatgctacttctggaagttttatcctaagccatatgcccatttgcataatgctgaaagttttatttaaaaaaaaaccatcctttagtaacctccacaactaactattcactgtttttagtttttaaagtaataattatcatgcctgtttacaattacaattcacacattcaatctaacaagaataatgactagatccgtgttaaatttccttccctgtgaagcaattttatcagatgacagctacaactgaagttgtttcaaactaatgcatcatccccaaacagtattgttcaaaataaagtcgttgtgagatttgcaagaactcaatcaaaaggcaactcctccttttcgggaagaataattttgggaaaatatttcctcttaggtttaagcatacatagtatttcattcacagtatctcagacattatcagtataagtgaatgaatagcctcactgaagctcaacaacaccaaaaaaaaaaaaaaaaaaaaaaatcctacagggctaaatacagaagaggctctaaaagaaaatctcttaagtttctattcctccttgtacttcccaaacttgaacttctcagcagtaagataacatttttaagaagagcacttaaaagagagaccaaaattcattaatagtagtcaacttaagtaaaggtttctggtttgaaaaaacaaaatcccagtaaaagcagaattttagttggttctaagtttcctcaacttgcgataagtttacttaattagtctactaataactagtgggttagagggtgctgaaagttaccccattcctggggaccctgcttattgaccagcaaataaggactgggattctttgggtaaagggaaatcttttcttgttaagtcagacctttacacagaataactgtctctgaattggaaagctatctacaaaagtacaaacataacaatttggtaaaggagatcattgtattgggttctgtattatggccatgtattttcacaagtttttttttttaattacttttttaaagtatcatctgtctcattcatgctaaaaagaagcaaagaaaggcaaaacagccatgtttaaaatattggagttttacaaggagcattgagggtcacccacaagaggaaatggaagtaaaagtgaagaactctttcttcactggagattctccttcaaaagaacttctctgctttacagtgaaatagtctgtacttagtttccgcaggggaagccacacccttgtaaccatgcttctcaaactcttagtgtctgttcctgaggggcattcaaagccaagggataaacatggcacattttcctagaggagagggtaagaaatatcactgacaaattttaatactaaaatagttatggaataaaatgtaaattgcatgagtcttaacgatacaacataagacttagaagaaatattgtgtggacctgggcctacaccccagacagatacctcaggggtacatatgctctccttctgttacagctacttctagggaaaggttcgagaagtagtaccttaaagaacatatcagagacaattttttttatttttactatgaacaagttatccaaaatttattctgggcaaacagaaaaaaaaagggagcaaatattaatttgtagatgcaattactattttcctttgtttactgatttaactctttgggtttaagatatggaaatcttcctccagtttattctgtacacctccataaaagctccattaaaggcttattcgtatgtctccaaggccttgacaaatgtagccatcaaccttatacagatacatgctgtgagaaaaacatttgacagtatgcaatttgcatatacctgatcttccattctctctgtgccttctaagataatcttctggacattttcttgtctttcctgagcaagagaaaatttatttaaaaaaacaacccacaacattttgatacttgcttatttttcaatagacatgttcttgtgtagtaatttagttcacaagaaaaatactttctactttagggaaaaaatgggggcaggggtaggaaattaacccaacaaatgcatgttctcataaacaatacaaaataaaatcaaaacaacctttattctgcagtgaaaaaaagataacttcacagaaaacagtcaatgtaacatctgcatagtttcaaaaaggaaaagaatgacttgcacttttcaaattaaacattatgatgttgtttaaaagattctcctgattttaagagtttcataatgtgagaaaaaaggaagtaagcctgcaaacatagtaaaaaattattcttttaaaagatattatttttccttactattgggcaaaagccttttaaaactggtaatgcttaatggactttcaggttagtatcaaactggaacacaggaaggagaattcaatgtgttctttagatacatcaaaactatactgaaatgtaaatagcattatatattcaactacaggatttaggaaaacaataatttctgtaagattaaaaggaattctcttgggaaccattccattcaacctcctcattttatgaacctgggaacttggcaaagaggttaaagagaccaaaggctacatgaccaacagcttatgaaactattactttgaactgttatacttacacatagtagtaagcaaaagacagaattgtgcaatgaaagggaaacaaaaggtattagagtcaaaggctcccaagaagaatccagggtctaaaagtttctttatttgtctaagctttagcttttcatctataatgtggagctaccatttcgtaccttccacagttaatatgaagatgacaggtatcagaccagatgtatttgtatctaatagggtaaatgcaaaataaataacatttattgtttgatgttcactgcatataattaaaaaaataagatttatatgtaccagaaaataagctttcaacagataggttaacatgattaataagctgaaaaatcacttaccttatgcatccatattcttcctttccggattatatgtgttaatctatcaacacacactctatgaagtgggaggtagaaactaagttctgtctgtggaagtataattgatagtccatatgtgctgcgatccccattccagtttccatcaaagattaatgaaacaataatcactcccttttcagacaagacaaaaaactttacatctatagcaccactctctgcatttcgaaggatttctccatttagagtgtggttggcaagaaaagttatttctccatcactgagaagtacctgttctgtctttggagcccaaatgtgccttactctaggaccaagaatattgtcccagtaagcaaaagtagctgctaataaaggtgatttgccacttaaagcaatctctgtcttggcaacagctggagatggcggtgggcaaagagtcgacatcactgcattccaactgtcacattatccaaatgctccggagatatctaaacaatgacatatgaaaccaatgattaggttcagcaatttaaagatatccatcaaaaccccaaatgatttagacatatttggtttgtcctcttaagtcaaagatgtggaatcctgttatctcctatcaggataaagacattcaactagcacagtaggtgcacattaaatgtttgttgatatgatcattttacaagacatggtaacttgttacttatattcagggcatacatttagaaattcaaagaaataacttaaaaaagggcttctttacactgatattaaatgttacatactaaagctcatagaatagacccgcagtattcccaaatatccagtccatgtgcaattctagtatgactggagatttggcccctaacccatagcaactaaaaaggagaaaaacaggaagggaaaggctcagctagagactgacacttgtgggttgaattgtgtcccccaaaaagatatgttcaattcctaacccttggtgtacgtgaatgtgaccttatctagaaataagtgtaatcatgttaaaatggggtcatactggattagagtggggcctaatccaataactgctgtgtttataaggagagagatttggagacacagagacaaatggtagacagccatgtgaagacaaaaggcagatactggattgttgaaactacaaggcaagaaaggaacactcaggattgctggtaaccaccagaagccaggaagaggcaaggaaagagtcttctctcttgaagatcatgcccctgtcaacactttgatttcggacttctagcttctagaattgtgagagaataaattgctgttgtttaaagccactcagtttgtggtgctttgttaagtaatcttagaaaagtaatacaacacctaacaacagaaatactttaaagccgctaaaaggtcaaaaaaaaaaaaaaaaaaaaagacatggaaataccacaagtctggagccataacaaaaaatgggcaaacagtcctgtatcctcagtgaactctctggttatgagaatactgaagcccgatcctgatgtttaaaacgacattgaagtatcaagacaaagataaaaatatttaatatgctagccaagaaaccaatacagcatttcatcactgcaaagagagttctacactaaatggctagaatttaaaagctttagttatttagaacacgtagaaaacagaagggctaaatagggcccgttcaagcctttgaatttaatgagaaaacagacatgaggagaagaacataaacgctcacatccaagacagaacccagggctcttggtccccttgctcaacttgtacatcttaatccacataaacataccactctaaaaaggtacatcctatgtgatattaatgtaaaacaaatcattcttgcaaatacagttatgtgccatgtaacgtttcagtcaatggtagactgcatatatgatggtagtcccattagattacaatggacctgaaaatatgctattgccttagtgacactgtaaccatcataaggtcttagtactattttgcaagttatttaaagtatagcacatacaattattacagtgtacaacacttgataataaactactacattgctggtttatgtattcactatactatgccttttattgttattttagagtgcactccttctactttttttttttttaagttaaatgtaaaacagcctcaggcaagtccttcaggaggtattcaacagaaagcactgttatcataggtgacagctacatgtgtgttattgcccctaaaaaccttccagtgggacaagatgtggaggtggaaggcagtgaggtggaagggagtgatactgatgatcctaatcctgtctatgcctaggtgaaagtgtgtgtgttttagtttttaacaaaaacgactaacaagtaaaaaaaaaaatttaaaatagaaaatagaaaaaagcttctagaataaggatacaaagaaaaaatatttttgtatagctatacaatgtatttgtgtttcaagctaagtattttaaaagttaaaaaattaaaaagtttacaaagttaaaaagttataattttttattgaagaaaaactgttaagataaatttggtgtagcttcagcgtactgtgtttatagtctacagtggtgtacagtgttctaggccttcacattaattcaccactcactcactgactcacccagagcaacttctagtcctgcaagctccattcgtggtaagtggcctacacaggtataccattatcttttataccatacttttactgtaccttttctctgtttgcatatatttagataaatatttaccactgtgttacaactgtctatagtattcagtacagtaacagttgtacaggtttgtggcctaggagcaacagactataccatacggcctaggtacataaaggctatactatctaggtttgtgtaagtacactctatgatgtttgcataatgacaaaatcgcctaatgatgcattcctaagcaatgtgtgattgtactataattgaagacttgttatctaagactgaaagtaaaaagaattgcaatttcacctaagcaagtctaaaactgtgaagtctatttataataatagcaatacaaagcagctaataggcaaactatgatatacctatctttgccatatgattgctttgggagctaacatttgatctgtaaatgtatgacaaagtaaacaattttacttaaagaatttcatccacatcttgtcaagagagttcagtctgatggaaagcactgacttctatttacagagcattagatgagtgcttttatcatattatgagtaggcatacagagcctggcaaaacagttaactctaagtatgtacagaaatggttgaacacaacgacagttttaacacgtgtatttgtaatttcaaaaattcatttaggtaatatttacttttaaatatgttgtatcaatttaatagtcttaagagacagcactagatataagccgtacagcttctttaaaatatccactgtttttaatacaatgtaagcagtcagtttacaatgatcaaatataggaatgtaatctgaattgaaatggtaatgacactactgctgtcataactaacaacagcaaactggaggccaacataatgaattaagttaacatacaaccataaaattatattgcaaacatatttttctttcattcttttaggttaaaaaggtggataatcataaaggcaatattacaactctaatatttcatcattaaactgaaaataaaagtatttcctaaaacagaactgaaccctggagcaaaatctgattgaattatagggaaacttttaccacgttgtgaaaattgaactattatactgctagttacactctcactcctaacagaataagaaaaaaaaaatgggccgggcatggtgggtcacacctgttatcccagctctttggtaggccgaggcaggtggatcacctgaggtcaggagctcaagaccagcctggccaacatggtgaaaccccacctctactaaaaatacaaaaaattagccgggtgtggtggtggacacctgtaatcccagctactcgggaggctgaggcaggagaatctcttgaacccggaggtggcagaggttgcaatgagctgagatggcgccactgcactccagcctgggcgacagagagagactctgcctcaagaaaaaaacaaacaaacaaacaaacaaaaagaataagaaagaaaatgaaggacaaagatcatactgaattgcttagttttaaatcctaccaaaagaaatagcctgggaaatgaaatgtcacagagaagtataatcaggagagctgtacaattattttactaatacttgaagtcatcgtctttggtgagaaaaatccatacatgcaaatgcagctgaaaaaaatcagctcaaaaccaatagttgtttatgtacctatcttacgtacatgtagtgctgtctactccagagagttaccaaacattagccagtcttttgagggaagccaagattcaaattgagtgagacggtggcttgctcacagggttcatgagaggtttcccaatacactttctggaaataatcccatacatgcagacatgattacattaattaacatctgctaaaactgttagtagagtgctaagtttgaggttttgctttttctttaaacgtctgttaaaaaatcaaccatctcttccctgattggtatttagaaaggtggttggtccactgctattgtagtgaaaattctacaatcataaagccctcacttcttgttttttagagacagggtctcgttttgtcatccaggctggaatgcactggcaggatcatagctctcggtaacttcaaactcttgggctcaaatgaccctcctgcctcagcctcccaagtagctaggactacaggtgcacatcaccacgcccggctaagtttttaattttttgtagagacagggtctacgttgcccaggttgagcttgaactcctggcttcaagtgatcctcttgcctccgcctcccaaagctctggcattacaggtgtaagccaccttctccaacctggctctcaatacttgtaaccatgctgtttattttctcccagcccaaagagaagcaggatcctaaaccgtccactttccacaacaggagctgcccaggaccacttcaaggacagtgaactgtttacagtaccagaaagttcacaacactttctcaatcttcaacatcagggaagactggaaggtgaagttcatatcactatctggccatttctcacagttccaagtttctcagacaataggtaggctaacctagtcctcctgggaactatctaattaacgtagaatagaacccgagggcagacttgaaaaacagaagtcctccttggtttactttgtttctctgaaagcaaattgtggagtgccaacatagccaaacaaaatattttatcaacttcataaggtgcttgtaattttttcctggagcaggtaaatgctggcttagtgaacaatctggaatgtggtaattactctcgttcttgtttcagatgtactatcagcatgtagcagtttccaactgattcagggttttcctaaagtggcaggccttggcagaggtggtgacaacaatgcccgtgtcaaatgacaccgtatttcaagtattctgactccaggttattaatatcccctatatgatagtcttgtttctgtgatattcacagattatgttaaaagtttcccaaagtctgagaaaaatcatatcttaacagtatcttttttttttttgatcctttgtacaaaagtagaagtaatgccagacagattacgtacccttgttgtgaacaactggtgcatggcaactgtttgaatagaaatttaccaactgccacaaccaggcaactactctcccagagcctaacaatctcgattgcatctgaaagggccacccctcctgggaaagtgcaggacctccctcctgtttctgaatacaaagcctggtggtgttcaacgcggccagatagacccaatgagcacacggacatgtaatctgtgcacttctttagacaactgattaccatcagtcaagtgatgcccaagtcacaatagtcacttcctttaagcaagtctgtgtcatctcggagctgtgaagcaaccaggtcatgtcccacagaatggggagcacaccgacttgcattgctgccctcatatgcaagtcatcaccactctctagaagcttgggctgaaattgtgcaggcgtctccacacccccatctcatcccgcatgatctcctcgccggcagggaccgtctcgggttcctagcgaaccccgacttggtccgcagaagccgcgcgccgcccaccctccggccttcccccaggcgaggcctctcagtacccgaggctcccttttctcgagcccgcagcggcagcgctcccagcgggtccccgggaaggagacagctcgggtactgagggcgggaaagcaaggaagaggccagatccccatcccttgtccctgcgccgccgccgccgccgccgccgccgggaagcccggggcccggatgcaggcaattccaccagtcgctagaggcgaaagcccgacacccagcttcggtcagagaaatgagagggaaagtaaaaatgcgtcgagctctgaggagagcccccgcttctacccgcgcctcttcccggcagccgaaccccaaacagccacccgccaggatgccgcctcctcactcacccactcgccaccgcctgcgcctccgccgccgcgggcgcaggcaccgcaaccgcagccccgccccgggcccgcccccgggcccgccccgaccacgccccggccccggccccggcccctagcgcgcgactcctgagttccagagcttgctacaggctgcggttgtttccctccttgttttcttctggttaatctttatcaggtcttttcttgttcaccctcagcgagtactgtgagagcaagtagtggggagagagggtgggaaaaacaaaaacacacacctcctaaacccacacctgctcttgctagaccccgcccccaaaagagaagcaaccgggcagcagggacggctgacacaccaagcgtcatcttttacgtgggcggaacttgtcgctgtttgacgcacctctctttcctagcgggacaccgtaggttacgtctgtctgttttctatgtgcgatgacgttttctcacgaggctagcgaaatggggcggggcaacttgtcctgttcttttatcttaagacccgctctggaggagcgttggcgcaatagcgtgtgcgaaccttaataggggaggctgctggatctggagaaagtgaagacgatttcgtggttttgaatggttttgtttgtgcttggtaggcagtgggcgctcaacacataattggtggatgaaattttgtttttaccgtaagacactgttaagtgcattcaaaactccactgcaaaccctggtaggggacagctccggcactgcgggcgggaatcccacggtcccctgcaaagtcatcgcaattttgcctttacatgtaagaattctctcaagcatgattttcacactggggaatgtcatttttgctagttgcaatatgtggatgagttgtttttttttaacttttgaaaaacgtaccattctgtttgatgtgtaaaaaacacaaagatttttgaaaccttgcgtcttttggtctgcaggtgtatagattccacttactacagatgagtagcatttacaccactcagatgtgtaaaaaaacaaaggttttttaaactgtgtgccttttgatctgcaagtgtgagatggcacttactacagtgagtagcatttaatctttttcatcactaaaaatcacacagaacgttttaatcattcaccgaggaagaaagggaggaataaatacacaaaatggctctcaacgtctacaccttctgcagaaacagacccttttcctactgttctatgctttgtgaaagttgatcatacaaattgggtcattctttttatacccaactaaaatagtgggggtagggggtagaaaagcacttaggacaaatgacactgctcccacagtgtaattctctccaagtccagctgctgcaactgcccgttgtgacctgagaccagttttatctaatagttgctaaaatgacctgctgcagctctaattttatctaccaccatcactcaccagttgaaactcaccagctcctcagatccttaatagtgccaatgaattttctcaaagagcactatgtaacatttctcttttttaacaaaacctcccccttttctttgttgtgtggatataccgaagaccatctgatctacatgtatgccctaattgcaattctttcttcccaaataaatcacttaatttagagattcatctctgtatttttattttgactgacagcttataacaagtagctagcatttaccaagtttctacactgagttgtacttcacttatacgtggaattaaaaaacaactgaatttatagaaacagagtagacccttggttggggggcttggggggaaagaaaattgtagggtagggtacaaagttgcagttacgtctaatacatctagagatttaatgtacaacatgaggactagcgttaataattgtgttagtccattcttacactgctataaagaaataactgaaactgggtaatttataaagaaaagtttaatggctcacagttctgcaggctgtacaagaagcatggctggatcagcttctgggcaggccatagggaacttaaaatcatgatggaaggcatagggagaccccagacttcacatggcaggaactgggggaagagagaaatgggaggtgctacatacgtttaaacaactagatcttgtcagaactcactatatagtaccaagaggggactgtacaaaaccattagaagccaccccataatccactcacctcccaccaggcccaacctccaacactggggattacagttgaacatgagatttgggtggggacagagatccaaaccatgttattccaactctggcccctcccaaatctaatgtccttctcatattgcaaaatactgtcgtgccttaccaacagttccccaaagtcttaactcgatccagcattcattcaaaagtccaaagtcccaagtctcacctgagacgaagctagtcccttctacctatgaacctgtaaaatcaaaaacaaggtaattgcttcaaagatacaatgggggtataggcattgggcagatactgccattccgaaagggagaaatctgccaaaagaaagaggctatagggccccattgcaagtctgaaagccagccgggcagtcattaaatgttaaagctctgaaataatctcctttgactcacacccagggaacactgatgcaatgagtgggctcccaaaaccttgggcagaaccacccctgtggttttccagggttcatctcccacagctgctctcatgggctagcattgagtgcttgcagcttttccaggctgcagggtgcaagttgttggtggatctaccattctggggtctggaggacggtggctgtcttgtcatagctctgctaggcagtgccccaggggactctctgtgggggctgcaaccccacatttcttctccttgcttccctagtagatgttctccatgaggattccaccccagtaacaggcttctgtctggacatccaggctttttcatacatcctctaaaatctaggcagagcttcttaagcctcaactcttgcattatgtgcgcccgccggcttcacagcttatggaagccaccaaggcttatgcctggcaccctgtgaagcagcagcctgaactgtattcttactggtgaaagttatctgagttaccagctgcaaatccatgtgggtctgcagcaacctcaattcttgcctcctcagaagaaagaatttgaccaagaggcataaggcagaaaaagagactgcgacaagtttcagagcaggagtaaaagtttattaaaaagctttagaacaggaatgaaaggaaagtacatttggaagaggcccaagtgggcaccttggaggtcaagtgccctgtttgaccttgaacctaggatcttatacactggcctacttctgacatcttgtgcccctttcccttggtccttccctaagggtgagcttgccgcatgcatggtgccctgcttgcacttggaaggtgagcgtgtgcagtgtgtttactggagttgtatacatgcttacctgaggctttcttcccttttccggtggaatgcccccaaaggtcatacttcaccattttgcctcttaatgtgcatgttaagcccactctctcagttcctgagatcttattggaagcgcccagttaccaatttcaggtgtttctatctattgagaagttgcctctccctggtgctggctgcaaccaattactattttagagaggcagtatgacaactgcctgaccatcatctgatggttgcctgacattcctggtgggtggtggggacttctctcttaccccactcatgcctgattagctacctactgtaacagtacctgggcccctttgagcagctgggattcagggagcagagtcccaaggctgtaagagggagcaggggccctaggcctggcccaggaaatgattcagtcctcctaggcctcggggcctgtgatgagagggaccaccatgaaagcctaaaatgcctattaggaacacttttacactgttggtgggactgtaaactagttcaaccattgtggaagtcagtgtggcgattcctcagggatctagaactagaaataccatttgacccagccatcccatcactgggtatatacccaaaggactataaatcctgctgctataaagacacatgcacactatgtttattgtggcactattcacaatagcaaagacttggaaccaacccaaatgtccaacagtgatagactggattaagaaaatgtggcacatatacaccatggaatactatgcagccataaaaaatgatgagttcatgtcctttgtagggacatggatgaaattggaaatcgtcattctcagtaaactattgcaaggtcaaaaaaccaaacaccacatgttctcactcataggtgggaattgaacaatgagaacacatggacacaggaaggggaacatcacactctggggactgttgtggggtgggggaggggggagggatagcattaggagatatacctaatgctaaatgacgagttaatgggtgcagcacaccagcatggcacatgtatacatatgcaactaacctgcacattgtgcacatgtaccctaaaacttaaagtataataataataaaataaaaataaaataaaataaaatgcctgttagtcctatgagtctttctccccattgttttggttatcagcccttgccttccttttagttatgcaaatttatgcagcctgcttgacttcctctcctgagaacgagcttttctttactaccacatggccaggctgcaaaatttacaaacttttatgctctgcttcccttttaagtgtaagttccaatttcaggtcatttctgtgctcatgcctatgagcataggctattagaagcagctaggttacttcttgaacactctgctgcttagaaatttcttctgccagataccctaaatcatcattcttaagtctaagatttcacagatccctagaacagaggaacaatgcagctaagctctttgctaaagcatagcaaacctgacctttactcattcccaataaatttctcatttccatctgagacctcctcagcctggacttcactgtctatatcactatcagtattttggttacaaccactcaacaagttcctagcgagttccaaactttctctcatctttctgtcttcttctgagccctctaaaatgtttcaacttctgcctgttagccggttccaaagtcacttctacattttcaggtatctttatagcaatgcccttcttctcagtaacaattttctgtattagtccattcttgcattgctataaagaaatacttgagactgggtaatttacaaagaaaagaggtttaattgactcatggttctgcaggctgtataggaagcatggcagcatcagcttctggggatgcctcagagaacttacaa

SEQ ID NO: 17 - DNA, 2481 bp, Homo sapiens
  source 1..2481: mol_type = other DNA
gagttggaataacatggtttggatctctgtccccacccaaatctcatgttcaactgtaatccccagtgttggaggttgggcctggtgggaggtgagtggattatggggtggcttctaatggttttgtacagtcccctcttggtactatatagtgagttctgacaagatctagttgtttaaacgtatgtagcacctcccatttctctcttcccccagttcctgccatgtgaagtctggggtctccctatgccttccatcatgattttaagttccctatggcctgcccagaagctgatccagccatgcttcttgtacagcctgcagaactgtgagccattaaacttttctttataaattacccagtttcagttatttctttatagcagtgtaagaatggactaacacaattattaacgctagtcctcatgttgtacattaaatctctagatgtattagacgtaactgcaactttgtaccctaccctacaattttctttccccccaagccccccaaccaagggtctactctgtttctataaattcagttgttttttaattccacgtataagtgaagtacaactcagtgtagaaacttggtaaatgctagctacttgttataagctgtcagtcaaaataaaaatacagagatgaatctctaaattaagtgatttatttgggaagaaagaattgcaattagggcatacatgtagatcagatggtcttcggtatatccacacaacaaagaaaagggggaggttttgttaaaaaagagaaatgttacatagtgctctttgagaaaattcattggcactattaaggatctgaggagctggtgagtttcaactggtgagtgatggtggtagataaaattagagctgcagcaggtcattttagcaactattagataaaactggtctcaggtcacaacgggcagttgcagcagctggacttggagagaattacactgtgggagcagtgtcatttgtcctaagtgcttttctaccccctacccccactattttagttgggtataaaaagaatgacccaatttgtatgatcaactttcacaaagcatagaacagtaggaaaagggtctgtttctgcagaaggtgtagacgttgagagccattttgtgtatttattcctccctttcttcctcggtgaatgattaaaacgttctgtgtgatttttagtgatgaaaaagattaaatgctactcactgtagtaagtgccatctcacacttgcagatcaaaaggcacacagtttaaaaaacctttgtttttttacacatctgagtggtgtaaatgctactcatctgtagtaagtggaatctatacacctgcagaccaaaagacgcaaggtttcaaaaatctttgtgttttttacacatcaaacagaatggtacgtttttcaaaagttaaaaaaaaacaactcatccacatattgcaactagcaaaaatgacattccccagtgtgaaaatcatgcttgagagaattcttacatgtaaaggcaaaattgcgatgactttgcaggggaccgtgggattcccgcccgcagtgccggagctgtcccctaccagggtttgcagtggagttttgaatgcacttaacagtgtcttacggtaaaaacaaaatttcatccaccaattatgtgttgagcgcccactgcctaccaagcacaaacaaaaccattcaaaaccacgaaatcgtcttcactttctccagatccagcagcctcccctattaaggttcgcacacgctattgcgccaacgctcctccagagcgggtcttaagataaaagaacaggacaagttgccccgccccatttcgctagcctcgtgagaaaacgtcatcgcacatagaaaacagacagacgtaacctacggtgtcccgctaggaaagagaggtgcgtcaaacagcgacaagttccgcccacgtaaaagatgacgcttggtgtgtcagccgtccctgctgcccggttgcttctcttttgggggcggggtctagcaagagcaggtgtgggtttaggaggtgtgtgtttttgtttttcccaccctctctccccactacttgctctcacagtactcgctgagggtgaacaagaaaagacctgataaagattaaccagaagaaaacaaggagggaaacaaccgcagcctgtagcaagctctggaactcaggagtcgcgcgctaggggccggggccggggccggggcgtggtcggggcgggcccgggggcgggcccggggcggggctgcggttgcggtgcctgcgcccgcggcggcggaggcgcaggcggtggcgagtgggtgagtgaggaggcggcatcctggcgggtggctgtttggggttcggctgccgggaagaggcgcgggtagaagcgggggctctcctcagagctcgacgcatttttactttccctctcatttctctgaccgaagctgggtgtcgggctttcgcctctagcgactggtggaatt

SEQ ID NO: 18 - DNA, 2481 bp, Homo sapiens
  source 1..2481: mol_type = other DNA
aattccaccagtcgctagaggcgaaagcccgacacccagcttcggtcagagaaatgagagggaaagtaaaaatgcgtcgagctctgaggagagcccccgcttctacccgcgcctcttcccggcagccgaaccccaaacagccacccgccaggatgccgcctcctcactcacccactcgccaccgcctgcgcctccgccgccgcgggcgcaggcaccgcaaccgcagccccgccccgggcccgcccccgggcccgccccgaccacgccccggccccggccccggcccctagcgcgcgactcctgagttccagagcttgctacaggctgcggttgtttccctccttgttttcttctggttaatctttatcaggtcttttcttgttcaccctcagcgagtactgtgagagcaagtagtggggagagagggtgggaaaaacaaaaacacacacctcctaaacccacacctgctcttgctagaccccgcccccaaaagagaagcaaccgggcagcagggacggctgacacaccaagcgtcatcttttacgtgggcggaacttgtcgctgtttgacgcacctctctttcctagcgggacaccgtaggttacgtctgtctgttttctatgtgcgatgacgttttctcacgaggctagcgaaatggggcggggcaacttgtcctgttcttttatcttaagacccgctctggaggagcgttggcgcaatagcgtgtgcgaaccttaataggggaggctgctggatctggagaaagtgaagacgatttcgtggttttgaatggttttgtttgtgcttggtaggcagtgggcgctcaacacataattggtggatgaaattttgtttttaccgtaagacactgttaagtgcattcaaaactccactgcaaaccctggtaggggacagctccggcactgcgggcgggaatcccacggtcccctgcaaagtcatcgcaattttgcctttacatgtaagaattctctcaagcatgattttcacactggggaatgtcatttttgctagttgcaatatgtggatgagttgtttttttttaacttttgaaaaacgtaccattctgtttgatgtgtaaaaaacacaaagatttttgaaaccttgcgtcttttggtctgcaggtgtatagattccacttactacagatgagtagcatttacaccactcagatgtgtaaaaaaacaaaggttttttaaactgtgtgccttttgatctgcaagtgtgagatggcacttactacagtgagtagcatttaatctttttcatcactaaaaatcacacagaacgttttaatcattcaccgaggaagaaagggaggaataaatacacaaaatggctctcaacgtctacaccttctgcagaaacagacccttttcctactgttctatgctttgtgaaagttgatcatacaaattgggtcattctttttatacccaactaaaatagtgggggtagggggtagaaaagcacttaggacaaatgacactgctcccacagtgtaattctctccaagtccagctgctgcaactgcccgttgtgacctgagaccagttttatctaatagttgctaaaatgacctgctgcagctctaattttatctaccaccatcactcaccagttgaaactcaccagctcctcagatccttaatagtgccaatgaattttctcaaagagcactatgtaacatttctcttttttaacaaaacctcccccttttctttgttgtgtggatataccgaagaccatctgatctacatgtatgccctaattgcaattctttcttcccaaataaatcacttaatttagagattcatctctgtatttttattttgactgacagcttataacaagtagctagcatttaccaagtttctacactgagttgtacttcacttatacgtggaattaaaaaacaactgaatttatagaaacagagtagacccttggttggggggcttggggggaaagaaaattgtagggtagggtacaaagttgcagttacgtctaatacatctagagatttaatgtacaacatgaggactagcgttaataattgtgttagtccattcttacactgctataaagaaataactgaaactgggtaatttataaagaaaagtttaatggctcacagttctgcaggctgtacaagaagcatggctggatcagcttctgggcaggccatagggaacttaaaatcatgatggaaggcatagggagaccccagacttcacatggcaggaactgggggaagagagaaatgggaggtgctacatacgtttaaacaactagatcttgtcagaactcactatatagtaccaagaggggactgtacaaaaccattagaagccaccccataatccactcacctcccaccaggcccaacctccaacactggggattacagttgaacatgagatttgggtggggacagagatccaaaccatgttattccaactc

SEQ ID NO: 19 - DNA, 481 bp, Homo sapiens
  source 1..481: mol_type = other DNA
gggtctagcaagagcaggtgtgggtttaggaggtgtgtgtttttgtttttcccaccctctctccccactacttgctctcacagtactcgctgagggtgaacaagaaaagacctgataaagattaaccagaagaaaacaaggagggaaacaaccgcagcctgtagcaagctctggaactcaggagtcgcgcgctaggggccggggccggggccggggcgtggtcggggcgggcccgggggcgggcccggggcggggctgcggttgcggtgcctgcgcccgcggcggcggaggcgcaggcggtggcgagtgggtgagtgaggaggcggcatcctggcgggtggctgtttggggttcggctgccgggaagaggcgcgggtagaagcgggggctctcctcagagctcgacgcatttttactttccctctcatttctctgaccgaagctgggtgtcgggctttcgcctctagcgactggtggaatt

SEQ ID NO: 20 - DNA, 481 bp, Homo sapiens
  source 1..481: mol_type = other DNA
aattccaccagtcgctagaggcgaaagcccgacacccagcttcggtcagagaaatgagagggaaagtaaaaatgcgtcgagctctgaggagagcccccgcttctacccgcgcctcttcccggcagccgaaccccaaacagccacccgccaggatgccgcctcctcactcacccactcgccaccgcctgcgcctccgccgccgcgggcgcaggcaccgcaaccgcagccccgccccgggcccgcccccgggcccgccccgaccacgccccggccccggccccggcccctagcgcgcgactcctgagttccagagcttgctacaggctgcggttgtttccctccttgttttcttctggttaatctttatcaggtcttttcttgttcaccctcagcgagtactgtgagagcaagtagtggggagagagggtgggaaaaacaaaaacacacacctcctaaacccacacctgctcttgctagaccc

SEQ ID NO: 21 - RNA, 49 nt, synthetic construct
  source 1..49: mol_type = other RNA
  modified_base 5: mod_base = OTHER; note = 5'-methyluridine-3'-phosphate
  modified_base 6: mod_base = OTHER; note = 5'-methyluridine-3'-phosphate
  modified_base 10: mod_base = OTHER; note = 5'-methyluridine-3'-phosphate
  modified_base 19: mod_base = OTHER; note = 5'-methyluridine-3'-phosphate
cagcttcggtcagagaaatgagagggaaagtaaaaatgcgtcgagctct

SEQ ID NO: 22 - RNA, 33 nt, synthetic construct
  source 1..33: mol_type = other RNA
  modified_base 7: mod_base = OTHER; note = 5'-methyluridine-3'-phosphate
  modified_base 10: mod_base = OTHER; note = 5'-methyluridine-3'-phosphate
  modified_base 14: mod_base = OTHER; note = 5'-methyluridine-3'-phosphate
  modified_base 15: mod_base = OTHER; note = 5'-methyluridine-3'-phosphate
  modified_base 23: mod_base = OTHER; note = 5'-methyluridine-3'-phosphate
  modified_base 24: mod_base = OTHER; note = 5'-methyluridine-3'-phosphate
  modified_base 27: mod_base = OTHER; note = 5'-methyluridine
cgcgactcctgagttccagagcttgctacaggc

SEQ ID NO: 23 - RNA, 27 nt, synthetic construct
  source 1..27: mol_type = other RNA
  modified_base 5: mod_base = OTHER; note = 5'-methyluridine-3'-phosphate
  modified_base 10: mod_base = OTHER; note = 5'-methyluridine-3'-phosphate
  modified_base 11: mod_base = OTHER; note = 5'-methyluridine-3'-phosphate
  modified_base 13: mod_base = OTHER; note = 5'-methyluridine-3'-phosphate
  modified_base 14: mod_base = OTHER; note = 5'-methyluridine-3'-phosphate
  modified_base 15: mod_base = OTHER; note = 5'-methyluridine-3'-phosphate
  modified_base 19: mod_base = OTHER; note = 5'-methyluridine-3'-phosphate
  modified_base 22: mod_base = OTHER; note = 5'-methyluridine-3'-phosphate
  modified_base 23: mod_base = OTHER; note = 5'-methyluridine-3'-phosphate
  modified_base 25: mod_base = OTHER; note = 5'-methyluridine-3'-phosphate
  modified_base 26: mod_base = OTHER; note = 5'-methyluridine-3'-phosphate
  modified_base 27: mod_base = OTHER; note = 5'-methyluridine
aggctgcggttgtttccctccttgttt

SEQ ID NO: 24 - RNA, 79 nt, synthetic construct
  source 1..79: mol_type = other RNA
  modified_base 3: mod_base = OTHER; note = 5'-methyluridine-3'-phosphate
  modified_base 4: mod_base = OTHER; note = 5'-methyluridine-3'-phosphate
  modified_base 6: mod_base = OTHER; note = 5'-methyluridine-3'-phosphate
  modified_base 7: mod_base = OTHER; note = 5'-methyluridine-3'-phosphate
  modified_base 8: mod_base = OTHER; note = 5'-methyluridine-3'-phosphate
  modified_base 12: mod_base = OTHER; note = 5'-methyluridine-3'-phosphate
  modified_base 15: mod_base = OTHER; note = 5'-methyluridine-3'-phosphate
  modified_base 16: mod_base = OTHER; note = 5'-methyluridine-3'-phosphate
  modified_base 18: mod_base = OTHER; note = 5'-methyluridine-3'-phosphate
  modified_base 19: mod_base = OTHER; note = 5'-methyluridine-3'-phosphate
  modified_base 20: mod_base = OTHER; note = 5'-methyluridine-3'-phosphate
  modified_base 21: mod_base = OTHER; note = 5'-methyluridine-3'-phosphate
  modified_base 23: mod_base = OTHER; note = 5'-methyluridine-3'-phosphate
  modified_base 24: mod_base = OTHER; note = 5'-methyluridine-3'-phosphate
  modified_base 26: mod_base = OTHER; note = 5'-methyluridine-3'-phosphate
ggttgtttccctccttgttttcttctggttaatctttatcaggtcttttcttgttcaccctcagcgagtactgtgagag

SEQ ID NO: 25 - RNA, 24 nt, synthetic construct
  source 1..24: mol_type = other RNA
  modified_base 2: mod_base = OTHER; note = 5'-methyluridine-3'-phosphate
  modified_base 10: mod_base = OTHER; note = 5'-methyluridine-3'-phosphate
  modified_base 13: mod_base = OTHER; note = 5'-methyluridine-3'-phosphate
  modified_base 15: mod_base = OTHER; note = 5'-methyluridine-3'-phosphate
ctcagcgagtactgtgagagcaag

SEQ ID NO: 26 - RNA, 33 nt, synthetic construct
  source 1..33: mol_type = other RNA
  modified_base 4: mod_base = OTHER; note = 5'-methyluridine-3'-phosphate
  modified_base 7: mod_base = OTHER; note = 5'-methyluridine-3'-phosphate
  modified_base 19: mod_base = OTHER; note = 5'-methyluridine-3'-phosphate
  modified_base 22: mod_base = OTHER; note = 5'-methyluridine-3'-phosphate
  modified_base 24: mod_base = OTHER; note = 5'-methyluridine-3'-phosphate
  modified_base 25: mod_base = OTHER; note = 5'-methyluridine-3'-phosphate
acctcctaaacccacacctgctcttgctagacc

SEQ ID NO: 27 - RNA, 48 nt, synthetic construct
  source 1..48: mol_type = other RNA
  modified_base 5: mod_base = OTHER; note = 5'-methyluridine-3'-phosphate
  modified_base 6: mod_base = OTHER; note = 5'-methyluridine-3'-phosphate
  modified_base 10: mod_base = OTHER; note = 5'-methyluridine-3'-phosphate
  modified_base 19: mod_base = OTHER; note = 5'-methyluridine-3'-phosphate
cagcttcggtcagagaaatgagagggaaagtaaaaatgcgtcgagctc

SEQ ID NO: 28 - RNA, 24 nt, synthetic construct
  source 1..24: mol_type = other RNA
  modified_base 7: mod_base = OTHER; note = 5'-methyluridine-3'-phosphate
  modified_base 10: mod_base = OTHER; note = 5'-methyluridine-3'-phosphate
  modified_base 14: mod_base = OTHER; note = 5'-methyluridine-3'-phosphate
  modified_base 15: mod_base = OTHER; note = 5'-methyluridine-3'-phosphate
  modified_base 23: mod_base = OTHER; note = 5'-methyluridine-3'-phosphate
  modified_base 24: mod_base = OTHER; note = 5'-methyluridine
cgcgactcctgagttccagagctt

SEQ ID NO: 29 - RNA, 30 nt, synthetic construct
  source 1..30: mol_type = other RNA
  modified_base 4: mod_base = OTHER; note = 5'-methyluridine-3'-phosphate
  modified_base 7: mod_base = OTHER; note = 5'-methyluridine-3'-phosphate
  modified_base 11: mod_base = OTHER; note = 5'-methyluridine-3'-phosphate
  modified_base 12: mod_base = OTHER; note = 5'-methyluridine-3'-phosphate
  modified_base 20: mod_base = OTHER; note = 5'-methyluridine-3'-phosphate
  modified_base 21: mod_base = OTHER; note = 5'-methyluridine-3'-phosphate
  modified_base 24: mod_base = OTHER; note = 5'-methyluridine-3'-phosphate
gactcctgagttccagagcttgctacaggc

SEQ ID NO: 30 - RNA, 26 nt, synthetic construct
  source 1..26: mol_type = other RNA
  modified_base 4: mod_base = OTHER; note = 5'-methyluridine-3'-phosphate
  modified_base 9: mod_base = OTHER; note = 5'-methyluridine-3'-phosphate
  modified_base 10: mod_base = OTHER; note = 5'-methyluridine-3'-phosphate
  modified_base 12: mod_base = OTHER; note = 5'-methyluridine-3'-phosphate
  modified_base 13: mod_base = OTHER; note = 5'-methyluridine-3'-phosphate
  modified_base 14: mod_base = OTHER; note = 5'-methyluridine-3'-phosphate
  modified_base 18: mod_base = OTHER; note = 5'-methyluridine-3'-phosphate
  modified_base 21: mod_base = OTHER; note = 5'-methyluridine-3'-phosphate
  modified_base 22: mod_base = OTHER; note = 5'-methyluridine-3'-phosphate
  modified_base 24: mod_base = OTHER; note = 5'-methyluridine-3'-phosphate
  modified_base 25: mod_base = OTHER; note = 5'-methyluridine-3'-phosphate
  modified_base 26: mod_base = OTHER; note = 5'-methyluridine
ggctgcggttgtttccctccttgttt

SEQ ID NO: 31 - RNA, 79 nt, synthetic construct; identical to SEQ ID NO: 24
  source 1..79: mol_type = other RNA
  modified_base 3: mod_base = OTHER; note = 5'-methyluridine-3'-phosphate
  modified_base 4: mod_base = OTHER; note = 5'-methyluridine-3'-phosphate
  modified_base 6: mod_base = OTHER; note = 5'-methyluridine-3'-phosphate
  modified_base 7: mod_base = OTHER; note = 5'-methyluridine-3'-phosphate
  modified_base 8: mod_base = OTHER; note = 5'-methyluridine-3'-phosphate
  modified_base 12: mod_base = OTHER; note = 5'-methyluridine-3'-phosphate
  modified_base 15: mod_base = OTHER; note = 5'-methyluridine-3'-phosphate
  modified_base 16: mod_base = OTHER; note = 5'-methyluridine-3'-phosphate
  modified_base 18: mod_base = OTHER; note = 5'-methyluridine-3'-phosphate
  modified_base 19: mod_base = OTHER; note = 5'-methyluridine-3'-phosphate
  modified_base 20: mod_base = OTHER; note = 5'-methyluridine-3'-phosphate
  modified_base 21: mod_base = OTHER; note = 5'-methyluridine-3'-phosphate
  modified_base 23: mod_base = OTHER; note = 5'-methyluridine-3'-phosphate
  modified_base 24: mod_base = OTHER; note = 5'-methyluridine-3'-phosphate
  modified_base 26: mod_base = OTHER; note = 5'-methyluridine-3'-phosphate

SEQ ID NO: 32 - RNA, 46 nt, synthetic construct
  source 1..46: mol_type = other RNA
  modified_base 5: mod_base = OTHER; note = 5'-methyluridine-3'-phosphate
  modified_base 6: mod_base = OTHER; note = 5'-methyluridine-3'-phosphate
  modified_base 10: mod_base = OTHER; note = 5'-methyluridine-3'-phosphate
  modified_base 19: mod_base = OTHER; note = 5'-methyluridine-3'-phosphate
cagcttcggtcagagaaatgagagggaaagtaaaaatgcgtcgagc

SEQ ID NO: 33 - RNA, 27 nt, synthetic construct
  source 1..27: mol_type = other RNA
  modified_base 3: mod_base = OTHER; note = 5'-methyluridine-3'-phosphate
  modified_base 6: mod_base = OTHER; note = 5'-methyluridine-3'-phosphate
  modified_base 10: mod_base = OTHER; note = 5'-methyluridine-3'-phosphate
  modified_base 11: mod_base = OTHER; note = 5'-methyluridine-3'-phosphate
  modified_base 19: mod_base = OTHER; note = 5'-methyluridine-3'-phosphate
  modified_base 20: mod_base = OTHER; note = 5'-methyluridine-3'-phosphate
  modified_base 23: mod_base = OTHER; note = 5'-methyluridine-3'-phosphate
actcctgagttccagagcttgctacag

SEQ ID NO: 34 - RNA, 24 nt, synthetic construct
  source 1..24: mol_type = other RNA
  modified_base 2: mod_base = OTHER; note = 5'-methyluridine-3'-phosphate
  modified_base 7: mod_base = OTHER; note = 5'-methyluridine-3'-phosphate
  modified_base 8: mod_base = OTHER; note = 5'-methyluridine-3'-phosphate
  modified_base 10: mod_base = OTHER; note = 5'-methyluridine-3'-phosphate
  modified_base 11: mod_base = OTHER; note = 5'-methyluridine-3'-phosphate
  modified_base 12: mod_base = OTHER; note = 5'-methyluridine-3'-phosphate
  modified_base 16: mod_base = OTHER; note = 5'-methyluridine-3'-phosphate
  modified_base 19: mod_base = OTHER; note = 5'-methyluridine-3'-phosphate
  modified_base 20: mod_base = OTHER; note = 5'-methyluridine-3'-phosphate
  modified_base 22: mod_base = OTHER; note = 5'-methyluridine-3'-phosphate
  modified_base 23: mod_base = OTHER; note = 5'-methyluridine-3'-phosphate
  modified_base 24: mod_base = OTHER; note = 5'-methyluridine
ctgcggttgtttccctccttgttt

SEQ ID NO: 35 - RNA, 37 nt, synthetic construct
  source 1..37: mol_type = other RNA
  modified_base 3: mod_base = OTHER; note = 5'-methyluridine-3'-phosphate
  modified_base 4: mod_base = OTHER; note = 5'-methyluridine-3'-phosphate
  modified_base 6: mod_base = OTHER; note = 5'-methyluridine-3'-phosphate
  modified_base 7: mod_base = OTHER; note = 5'-methyluridine-3'-phosphate
  modified_base 8: mod_base = OTHER; note = 5'-methyluridine-3'-phosphate
  modified_base 12: mod_base = OTHER; note = 5'-methyluridine-3'-phosphate
  modified_base 15: mod_base = OTHER; note = 5'-methyluridine-3'-phosphate
  modified_base 16: mod_base = OTHER; note = 5'-methyluridine-3'-phosphate
  modified_base 18: mod_base = OTHER; note = 5'-methyluridine-3'-phosphate
  modified_base 19: mod_base = OTHER; note = 5'-methyluridine-3'-phosphate
  modified_base 20: mod_base = OTHER; note = 5'-methyluridine-3'-phosphate
  modified_base 21: mod_base = OTHER; note = 5'-methyluridine-3'-phosphate
  modified_base 23: mod_base = OTHER; note = 5'-methyluridine-3'-phosphate
  modified_base 24: mod_base = OTHER; note = 5'-methyluridine-3'-phosphate
  modified_base 26: mod_base = OTHER; note = 5'-methyluridine-3'-phosphate
ggttgtttccctccttgttttcttctggttaatcttt

SEQ ID NO: 36 - RNA, 50 nt, synthetic construct
  source 1..50: mol_type = other RNA
  modified_base 1: mod_base = OTHER; note = 5'-methyluridine-3'-phosphate
  modified_base 2: mod_base = OTHER; note = 5'-methyluridine-3'-phosphate
  modified_base 3: mod_base = OTHER; note = 5'-methyluridine-3'-phosphate
  modified_base 5: mod_base = OTHER; note = 5'-methyluridine-3'-phosphate
  modified_base 6: mod_base = OTHER; note = 5'-methyluridine-3'-phosphate
  modified_base 8: mod_base = OTHER; note = 5'-methyluridine-3'-phosphate
  modified_base 11: mod_base = OTHER; note = 5'-methyluridine-3'-phosphate
  modified_base 12: mod_base = OTHER; note = 5'-methyluridine-3'-phosphate
  modified_base 15: mod_base = OTHER; note = 5'-methyluridine-3'-phosphate
  modified_base 17: mod_base = OTHER; note = 5'-methyluridine-3'-phosphate
  modified_base 18: mod_base = OTHER; note = 5'-methyluridine-3'-phosphate
  modified_base 19: mod_base = OTHER; note = 5'-methyluridine-3'-phosphate
  modified_base 21: mod_base = OTHER; note = 5'-methyluridine-3'-phosphate
  modified_base 26: mod_base = OTHER; note = 5'-methyluridine-3'-phosphate
tttcttctggttaatctttatcaggtcttttcttgttcaccctcagcgag

SEQ ID NO: 37 - RNA, 24 nt, synthetic construct
  source 1..24: mol_type = other RNA
  modified_base 12: mod_base = OTHER; note = 5'-methyluridine-3'-phosphate
  modified_base 18: mod_base = OTHER; note = 5'-methyluridine-3'-phosphate
  modified_base 22: mod_base = OTHER; note = 5'-methyluridine-3'-phosphate
gagagggaaagtaaaaatgcgtcg

SEQ ID NO: 38 - RNA, 37 nt, synthetic construct; identical to SEQ ID NO: 35
  source 1..37: mol_type = other RNA
  modified_base 3: mod_base = OTHER; note = 5'-methyluridine-3'-phosphate
  modified_base 4: mod_base = OTHER; note = 5'-methyluridine-3'-phosphate
  modified_base 6: mod_base = OTHER; note = 5'-methyluridine-3'-phosphate
  modified_base 7: mod_base = OTHER; note = 5'-methyluridine-3'-phosphate
  modified_base 8: mod_base = OTHER; note = 5'-methyluridine-3'-phosphate
  modified_base 12: mod_base = OTHER; note = 5'-methyluridine-3'-phosphate
  modified_base 15: mod_base = OTHER; note = 5'-methyluridine-3'-phosphate
  modified_base 16: mod_base = OTHER; note = 5'-methyluridine-3'-phosphate
  modified_base 18: mod_base = OTHER; note = 5'-methyluridine-3'-phosphate
  modified_base 19: mod_base = OTHER; note = 5'-methyluridine-3'-phosphate
  modified_base 20: mod_base = OTHER; note = 5'-methyluridine-3'-phosphate
  modified_base 21: mod_base = OTHER; note = 5'-methyluridine-3'-phosphate
  modified_base 23: mod_base = OTHER; note = 5'-methyluridine-3'-phosphate
  modified_base 24: mod_base = OTHER; note = 5'-methyluridine-3'-phosphate
  modified_base 26: mod_base = OTHER; note = 5'-methyluridine-3'-phosphate

SEQ ID NO: 39 - RNA, 48 nt, synthetic construct
  source 1..48: mol_type = other RNA
  modified_base 1: mod_base = OTHER; note = 5'-methyluridine-3'-phosphate
  modified_base 2: mod_base = OTHER; note = 5'-methyluridine-3'-phosphate
  modified_base 3: mod_base = OTHER; note = 5'-methyluridine-3'-phosphate
  modified_base 5: mod_base = OTHER; note = 5'-methyluridine-3'-phosphate
  modified_base 6: mod_base = OTHER; note = 5'-methyluridine-3'-phosphate
  modified_base 8: mod_base = OTHER; note = 5'-methyluridine-3'-phosphate
  modified_base 11: mod_base = OTHER; note = 5'-methyluridine-3'-phosphate
  modified_base 12: mod_base = OTHER; note = 5'-methyluridine-3'-phosphate
  modified_base 15: mod_base = OTHER; note = 5'-methyluridine-3'-phosphate
  modified_base 17: mod_base = OTHER; note = 5'-methyluridine-3'-phosphate
  modified_base 18: mod_base = OTHER; note = 5'-methyluridine-3'-phosphate
  modified_base 19: mod_base = OTHER; note = 5'-methyluridine-3'-phosphate
  modified_base 21: mod_base = OTHER; note = 5'-methyluridine-3'-phosphate
  modified_base 26: mod_base = OTHER; note = 5'-methyluridine-3'-phosphate
tttcttctggttaatctttatcaggtcttttcttgttcaccctcagcg

SEQ ID NO: 40 - RNA, 33 nt, synthetic construct
  source 1..33: mol_type = other RNA
  modified_base 2: mod_base = OTHER; note = 5'-methyluridine-3'-phosphate
  modified_base 3: mod_base = OTHER; note = 5'-methyluridine-3'-phosphate
  modified_base 4: mod_base = OTHER; note = 5'-methyluridine-3'-phosphate
  modified_base 8: mod_base = OTHER; note = 5'-methyluridine-3'-phosphate
  modified_base 11: mod_base = OTHER; note = 5'-methyluridine-3'-phosphate
  modified_base 12: mod_base = OTHER; note = 5'-methyluridine-3'-phosphate
  modified_base 14: mod_base = OTHER; note = 5'-methyluridine-3'-phosphate
  modified_base 15: mod_base = OTHER; note = 5'-methyluridine-3'-phosphate
  modified_base 16: mod_base = OTHER; note = 5'-methyluridine-3'-phosphate
  modified_base 17: mod_base = OTHER; note = 5'-methyluridine-3'-phosphate
  modified_base 19: mod_base = OTHER; note = 5'-methyluridine-3'-phosphate
  modified_base 20: mod_base = OTHER; note = 5'-methyluridine-3'-phosphate
  modified_base 22: mod_base = OTHER; note = 5'-methyluridine-3'-phosphate
  modified_base 25: mod_base = OTHER; note = 5'-methyluridine-3'-phosphate
  modified_base 26: mod_base = OTHER; note = 5'-methyluridine-3'-phosphate
gtttccctccttgttttcttctggttaatcttt

SEQ ID NO: 41 - RNA, 47 nt, synthetic construct
  source 1..47: mol_type = other RNA
  modified_base 1: mod_base = OTHER; note = 5'-methyluridine-3'-phosphate
  modified_base 2: mod_base = OTHER; note = 5'-methyluridine-3'-phosphate
  modified_base 3: mod_base = OTHER; note = 5'-methyluridine-3'-phosphate
  modified_base 5: mod_base = OTHER; note = 5'-methyluridine-3'-phosphate
  modified_base 6: mod_base = OTHER; note = 5'-methyluridine-3'-phosphate
  modified_base 8: mod_base = OTHER; note = 5'-methyluridine-3'-phosphate
  modified_base 11: mod_base = OTHER; note = 5'-methyluridine-3'-phosphate
  modified_base 12: mod_base = OTHER; note = 5'-methyluridine-3'-phosphate
  modified_base 15: mod_base = OTHER; note = 5'-methyluridine-3'-phosphate
  modified_base 17: mod_base = OTHER; note = 5'-methyluridine-3'-phosphate
  modified_base 18: mod_base = OTHER; note = 5'-methyluridine-3'-phosphate
  modified_base 19: mod_base = OTHER; note = 5'-methyluridine-3'-phosphate
  modified_base 21: mod_base = OTHER; note = 5'-methyluridine-3'-phosphate
  modified_base 26: mod_base = OTHER; note = 5'-methyluridine-3'-phosphate
tttcttctggttaatctttatcaggtcttttcttgttcaccctcagc

SEQ ID NO: 42 - RNA, 26 nt, synthetic construct
  source 1..26: mol_type = other RNA
  modified_base 2: mod_base = OTHER; note = 5'-methyluridine-3'-phosphate
  modified_base 3: mod_base = OTHER; note = 5'-methyluridine-3'-phosphate
  modified_base 4: mod_base = OTHER; note = 5'-methyluridine-3'-phosphate
  modified_base 8: mod_base = OTHER; note = 5'-methyluridine-3'-phosphate
  modified_base 11: mod_base = OTHER; note = 5'-methyluridine-3'-phosphate
  modified_base 12: mod_base = OTHER; note = 5'-methyluridine-3'-phosphate
  modified_base 14: mod_base = OTHER; note = 5'-methyluridine-3'-phosphate
  modified_base 15: mod_base = OTHER; note = 5'-methyluridine-3'-phosphate
  modified_base 16: mod_base = OTHER; note = 5'-methyluridine-3'-phosphate
  modified_base 17: mod_base = OTHER; note = 5'-methyluridine-3'-phosphate
  modified_base 19: mod_base = OTHER; note = 5'-methyluridine-3'-phosphate
  modified_base 20: mod_base = OTHER; note = 5'-methyluridine-3'-phosphate
  modified_base 22: mod_base = OTHER; note = 5'-methyluridine-3'-phosphate
  modified_base 25: mod_base = OTHER; note = 5'-methyluridine-3'-phosphate
  modified_base 26: mod_base = OTHER; note = 5'-methyluridine
gtttccctccttgttttcttctggtt

SEQ ID NO: 43 - RNA, 27 nt, synthetic construct
  source 1..27: mol_type = other RNA
  modified_base 2: mod_base = OTHER; note = 5'-methyluridine-3'-phosphate
  modified_base 5: mod_base = OTHER; note = 5'-methyluridine-3'-phosphate
  modified_base 6: mod_base = OTHER; note = 5'-methyluridine-3'-phosphate
  modified_base 8: mod_base = OTHER; note = 5'-methyluridine-3'-phosphate
  modified_base 9: mod_base = OTHER; note = 5'-methyluridine-3'-phosphate
  modified_base 10: mod_base = OTHER; note = 5'-methyluridine-3'-phosphate
  modified_base 11: mod_base = OTHER; note = 5'-methyluridine-3'-phosphate
  modified_base 13: mod_base = OTHER; note = 5'-methyluridine-3'-phosphate
  modified_base 14: mod_base = OTHER; note = 5'-methyluridine-3'-phosphate
  modified_base 16: mod_base = OTHER; note = 5'-methyluridine-3'-phosphate
  modified_base 19: mod_base = OTHER; note = 5'-methyluridine-3'-phosphate
  modified_base 20: mod_base = OTHER; note = 5'-methyluridine-3'-phosphate
  modified_base 23: mod_base = OTHER; note = 5'-methyluridine-3'-phosphate
  modified_base 25: mod_base = OTHER; note = 5'-methyluridine-3'-phosphate
  modified_base 26: mod_base = OTHER; note = 5'-methyluridine-3'-phosphate
  modified_base 27: mod_base = OTHER; note = 5'-methyluridine
ctccttgttttcttctggttaatcttt

SEQ ID NO: 44 - RNA, 42 nt, synthetic construct
  source 1..42: mol_type = other RNA
  modified_base 1: mod_base = OTHER; note = 5'-methyluridine-3'-phosphate
  modified_base 2: mod_base = OTHER; note = 5'-methyluridine-3'-phosphate
  modified_base 3: mod_base = OTHER; note = 5'-methyluridine-3'-phosphate
  modified_base 5: mod_base = OTHER; note = 5'-methyluridine-3'-phosphate
  modified_base 6: mod_base = OTHER; note = 5'-methyluridine-3'-phosphate
  modified_base 8: mod_base = OTHER; note = 5'-methyluridine-3'-phosphate
  modified_base 11: mod_base = OTHER; note = 5'-methyluridine-3'-phosphate
  modified_base 12: mod_base = OTHER; note = 5'-methyluridine-3'-phosphate
  modified_base 15: mod_base = OTHER; note = 5'-methyluridine-3'-phosphate
  modified_base 17: mod_base = OTHER; note = 5'-methyluridine-3'-phosphate
  modified_base 18: mod_base = OTHER; note = 5'-methyluridine-3'-phosphate
  modified_base 19: mod_base = OTHER; note = 5'-methyluridine-3'-phosphate
  modified_base 21: mod_base = OTHER; note = 5'-methyluridine-3'-phosphate
  modified_base 26: mod_base = OTHER; note = 5'-methyluridine-3'-phosphate
tttcttctggttaatctttatcaggtcttttcttgttcaccc

SEQ ID NO: 45 - RNA, 26 nt, synthetic construct
  source 1..26: mol_type = other RNA
  modified_base 1: mod_base = OTHER; note = 5'-methyluridine-3'-phosphate
  modified_base 4: mod_base = OTHER; note = 5'-methyluridine-3'-phosphate
  modified_base 5: mod_base = OTHER; note = 5'-methyluridine-3'-phosphate
  modified_base 7: mod_base = OTHER; note = 5'-methyluridine-3'-phosphate
  modified_base 8: mod_base = OTHER; note = 5'-methyluridine-3'-phosphate
  modified_base 9: mod_base = OTHER; note = 5'-methyluridine-3'-phosphate
  modified_base 10: mod_base = OTHER; note = 5'-methyluridine-3'-phosphate
  modified_base 12: mod_base = OTHER; note = 5'-methyluridine-3'-phosphate
  modified_base 13: mod_base = OTHER; note = 5'-methyluridine-3'-phosphate
  modified_base 15: mod_base = OTHER; note = 5'-methyluridine-3'-phosphate
  modified_base 18: mod_base = OTHER; note = 5'-methyluridine-3'-phosphate
  modified_base 19: mod_base = OTHER; note = 5'-methyluridine-3'-phosphate
  modified_base 22: mod_base = OTHER; note = 5'-methyluridine-3'-phosphate
  modified_base 24: mod_base = OTHER; note = 5'-methyluridine-3'-phosphate
  modified_base 25: mod_base = OTHER; note = 5'-methyluridine-3'-phosphate
  modified_base 26: mod_base = OTHER; note = 5'-methyluridine
tccttgttttcttctggttaatcttt

SEQ ID NO: 46 - RNA, 34 nt, synthetic construct
  source 1..34: mol_type = other RNA
  modified_base 1: mod_base = OTHER; note = 5'-methyluridine-3'-phosphate
  modified_base 2: mod_base = OTHER; note = 5'-methyluridine-3'-phosphate
  modified_base 3: mod_base = OTHER; note = 5'-methyluridine-3'-phosphate
  modified_base 5: mod_base = OTHER; note = 5'-methyluridine-3'-phosphate
  modified_base 6: mod_base = OTHER; note = 5'-methyluridine-3'-phosphate
  modified_base 8: mod_base = OTHER; note = 5'-methyluridine-3'-phosphate
  modified_base 11: mod_base = OTHER; note = 5'-methyluridine-3'-phosphate
  modified_base 12: mod_base = OTHER; note = 5'-methyluridine-3'-phosphate
  modified_base 15: mod_base = OTHER; note = 5'-methyluridine-3'-phosphate
  modified_base 17: mod_base = OTHER; note = 5'-methyluridine-3'-phosphate
  modified_base 18: mod_base = OTHER; note = 5'-methyluridine-3'-phosphate
  modified_base 19: mod_base = OTHER; note = 5'-methyluridine-3'-phosphate
  modified_base 21: mod_base = OTHER; note = 5'-methyluridine-3'-phosphate
  modified_base 26: mod_base = OTHER; note = 5'-methyluridine-3'-phosphate
tttcttctggttaatctttatcaggtcttttctt

SEQ ID NO: 47 - RNA, 29 nt, synthetic construct
  source 1..29: mol_type = other RNA
  modified_base 2: mod_base = OTHER; note = 5'-methyluridine-3'-phosphate
  modified_base 4: mod_base = OTHER; note = 5'-methyluridine-3'-phosphate
  modified_base 5: mod_base = OTHER; note = 5'-methyluridine-3'-phosphate
  modified_base 6: mod_base = OTHER; note = 5'-methyluridine-3'-phosphate
  modified_base 8: mod_base = OTHER; note = 5'-methyluridine-3'-phosphate
  modified_base 13: mod_base = OTHER; note = 5'-methyluridine-3'-phosphate
  modified_base 15: mod_base = OTHER; note = 5'-methyluridine-3'-phosphate
  modified_base 16: mod_base = OTHER; note = 5'-methyluridine-3'-phosphate
  modified_base 17: mod_base = OTHER; note = 5'-methyluridine-3'-phosphate
  modified_base 18: mod_base = OTHER; note = 5'-methyluridine-3'-phosphate
  modified_base 20: mod_base = OTHER; note = 5'-methyluridine-3'-phosphate
  modified_base 21: mod_base = OTHER; note = 5'-methyluridine-3'-phosphate
  modified_base 23: mod_base = OTHER; note = 5'-methyluridine-3'-phosphate
  modified_base 24: mod_base = OTHER; note = 5'-methyluridine-3'-phosphate
atctttatcaggtcttttcttgttcaccc

SEQ ID NO: 48 - RNA, 21 nt, synthetic construct
  source 1..21: mol_type = other RNA
aaaaaaaaaaaaaaaaaaaaa

SEQ ID NO: 49 - RNA, 21 nt, synthetic construct
  source 1..21: mol_type = other RNA
aaaaaaaaaaaaaaaaaaaaa

SEQ ID NO: 50 - RNA, 21 nt, synthetic construct
  source 1..21: mol_type = other RNA
aaaaaaaaaaaaaaaaaaaaa

SEQ ID NO: 51 - RNA, 25 nt, synthetic construct
  source 1..25: mol_type = other RNA
  modified_base 1: mod_base = OTHER; note = 5'-methyluridine-3'-phosphate
  modified_base 5: mod_base = OTHER; note = 5'-methyluridine-3'-phosphate
  modified_base 20: mod_base = OTHER; note = 5'-methyluridine-3'-phosphate
  modified_base 21: mod_base = OTHER; note = 5'-methyluridine-3'-phosphate
tgcgtcaaacagcgacaagttccgc

SEQ ID NO: 52 - RNA, 30 nt, synthetic construct
  source 1..30: mol_type = other RNA
  modified_base 8: mod_base = OTHER; note = 5'-methyluridine-3'-phosphate
  modified_base 15: mod_base = OTHER; note = 5'-methyluridine-3'-phosphate
  modified_base 21: mod_base = OTHER; note = 5'-methyluridine-3'-phosphate
  modified_base 22: mod_base = OTHER; note = 5'-methyluridine-3'-phosphate
  modified_base 25: mod_base = OTHER; note = 5'-methyluridine-3'-phosphate
  modified_base 27: mod_base = OTHER; note = 5'-methyluridine
gcccacgtaaaagatgacgcttggtgtgtc

SEQ ID NO: 53 - RNA, 26 nt, synthetic construct
  source 1..26: mol_type = other RNA
  modified_base 2: mod_base = OTHER; note = 5'-methyluridine-3'-phosphate
  modified_base 3: mod_base = OTHER; note = 5'-methyluridine-3'-phosphate
  modified_base 6: mod_base = OTHER; note = 5'-methyluridine-3'-phosphate
  modified_base 8: mod_base = OTHER; note = 5'-methyluridine-3'-phosphate
  modified_base 14: mod_base = OTHER; note = 5'-methyluridine-3'-phosphate
  modified_base 17: mod_base = OTHER; note = 5'-methyluridine-3'-phosphate
  modified_base 21: mod_base = OTHER; note = 5'-methyluridine-3'-phosphate
cttgctctcacagtactcgctgaggg

SEQ ID NO: 54 - RNA, 58 nt, synthetic construct
  source 1..58: mol_type = other RNA
  modified_base 1: mod_base = OTHER; note = 5'-methyluridine-3'-phosphate
  modified_base 5: mod_base = OTHER; note = 5'-methyluridine-3'-phosphate
  modified_base 11: mod_base = OTHER; note = 5'-methyluridine-3'-phosphate
  modified_base 27: mod_base = OTHER; note = 5'-methyluridine
tcgctgagggtgaacaagaaaagacctgataaagattaaccagaagaaaacaaggagg

SEQ ID NO: 55 - RNA, 27 nt, synthetic construct
  source 1..27: mol_type = other RNA
  modified_base 1: mod_base = OTHER; note = 5'-methyluridine-3'-phosphate
  modified_base 2: mod_base = OTHER; note = 5'-methyluridine-3'-phosphate
  modified_base 5: mod_base = OTHER; note = 5'-methyluridine-3'-phosphate
  modified_base 6: mod_base = OTHER; note = 5'-methyluridine-3'-phosphate
  modified_base 7: mod_base = OTHER; note = 5'-methyluridine-3'-phosphate
  modified_base 11: mod_base = OTHER; note = 5'-methyluridine-3'-phosphate
  modified_base 13: mod_base = OTHER; note = 5'-methyluridine-3'-phosphate
  modified_base 16: mod_base = OTHER; note = 5'-methyluridine-3'-phosphate
  modified_base 17: mod_base = OTHER; note = 5'-methyluridine-3'-phosphate
  modified_base 18: mod_base = OTHER; note = 5'-methyluridine-3'-phosphate
  modified_base 20: mod_base = OTHER; note = 5'-methyluridine-3'-phosphate
  modified_base 22: mod_base = OTHER; note = 5'-methyluridine-3'-phosphate
ttactttccctctcatttctctgaccg

SEQ ID NO: 56 - RNA, 26 nt, synthetic construct
  source 1..26: mol_type = other RNA
  modified_base 1: mod_base = OTHER; note = 5'-methyluridine-3'-phosphate
  modified_base 5: mod_base = OTHER; note = 5'-methyluridine-3'-phosphate
  modified_base 7: mod_base = OTHER; note = 5'-methyluridine-3'-phosphate
  modified_base 10: mod_base = OTHER; note = 5'-methyluridine-3'-phosphate
  modified_base 11: mod_base = OTHER; note = 5'-methyluridine-3'-phosphate
  modified_base 12: mod_base = OTHER; note = 5'-methyluridine-3'-phosphate
  modified_base 14: mod_base = OTHER; note = 5'-methyluridine-3'-phosphate
  modified_base 16: mod_base = OTHER; note = 5'-methyluridine-3'-phosphate
  modified_base 26: mod_base = OTHER; note = 5'-methyluridine
tccctctcatttctctgaccgaagct

SEQ ID NO: 57 - RNA, 40 nt, synthetic construct
  source 1..40: mol_type = other RNA
  modified_base 10: mod_base = OTHER; note = 5'-methyluridine-3'-phosphate
  modified_base 17: mod_base = OTHER; note = 5'-methyluridine-3'-phosphate
  modified_base 18: mod_base = OTHER; note = 5'-methyluridine-3'-phosphate
  modified_base 19: mod_base = OTHER; note = 5'-methyluridine-3'-phosphate
ggagacgcctgcacaatttcagcccaagcttctagagagt

SEQ ID NO: 58 - RNA, 34 nt, synthetic construct
  source 1..34: mol_type = other RNA
  modified_base 11: mod_base = OTHER; note = 5'-methyluridine-3'-phosphate
  modified_base 12: mod_base = OTHER; note = 5'-methyluridine-3'-phosphate
  modified_base 14: mod_base = OTHER; note = 5'-methyluridine-3'-phosphate
  modified_base 21: mod_base = OTHER; note = 5'-methyluridine-3'-phosphate
  modified_base 24: mod_base = OTHER; note = 5'-methyluridine-3'-phosphate
  modified_base 27: mod_base = OTHER; note = 5'-methyluridine
cagcccaagcttctagagagtggtgatgacttgc

SEQ ID NO: 59 - RNA, 29 nt, synthetic construct
  source 1..29: mol_type = other RNA
  modified_base 1: mod_base = OTHER; note = 5'-methyluridine-3'-phosphate
  modified_base 8: mod_base = OTHER; note = 5'-methyluridine-3'-phosphate
  modified_base 11: mod_base = OTHER; note = 5'-methyluridine-3'-phosphate
  modified_base 14: mod_base = OTHER; note = 5'-methyluridine-3'-phosphate
  modified_base 18: mod_base = OTHER; note = 5'-methyluridine-3'-phosphate
  modified_base 19: mod_base = OTHER; note = 5'-methyluridine-3'-phosphate
  modified_base 23: mod_base = OTHER; note = 5'-methyluridine-3'-phosphate
  modified_base 25: mod_base = OTHER; note = 5'-methyluridine-3'-phosphate
tagagagtggtgatgacttgcatatgagg

SEQ ID NO: 60 - RNA, 24 nt, synthetic construct
  source 1..24: mol_type = other RNA
  modified_base 2: mod_base = OTHER; note = 5'-methyluridine-3'-phosphate
  modified_base 4: mod_base = OTHER; note = 5'-methyluridine-3'-phosphate
  modified_base 11: mod_base = OTHER; note = 5'-methyluridine-3'-phosphate
  modified_base 16: mod_base = OTHER; note = 5'-methyluridine-3'-phosphate
  modified_base 19: mod_base = OTHER; note = 5'-methyluridine-3'-phosphate
  modified_base 20: mod_base = OTHER; note = 5'-methyluridine-3'-phosphate
  modified_base 23: mod_base = OTHER; note = 5'-methyluridine-3'-phosphate
  modified_base 24: mod_base = OTHER; note = 5'-methyluridine
ctgtgggacatgacctggttgctt

SEQ ID NO: 61 - RNA, 28 nt, synthetic construct
  source 1..28: mol_type = other RNA
  modified_base 6: mod_base = OTHER; note = 5'-methyluridine-3'-phosphate
  modified_base 11: mod_base = OTHER; note = 5'-methyluridine-3'-phosphate
  modified_base 14: mod_base = OTHER; note = 5'-methyluridine-3'-phosphate
  modified_base 15: mod_base = OTHER; note = 5'-methyluridine-3'-phosphate
  modified_base 18: mod_base = OTHER; note = 5'-methyluridine-3'-phosphate
  modified_base 19: mod_base = OTHER; note = 5'-methyluridine-3'-phosphate
  modified_base 26: mod_base = OTHER; note = 5'-methyluridine-3'-phosphate
ggacatgacctggttgcttcacagctcc

SEQ ID NO: 62 - RNA, 51 nt, synthetic construct
  source 1..51: mol_type = other RNA
  modified_base 3: mod_base = OTHER; note = 5'-methyluridine-3'-phosphate
  modified_base 6: mod_base = OTHER; note = 5'-methyluridine-3'-phosphate
  modified_base 7: mod_base = OTHER; note = 5'-methyluridine-3'-phosphate
  modified_base 10: mod_base = OTHER; note = 5'-methyluridine-3'-phosphate
  modified_base 11: mod_base = OTHER; note = 5'-methyluridine-3'-phosphate
  modified_base 18: mod_base = OTHER; note = 5'-methyluridine-3'-phosphate
  modified_base 25: mod_base = OTHER; note = 5'-methyluridine-3'-phosphate
cctggttgcttcacagctccgagatgacacagacttgcttaaaggaagtga

SEQ ID NO: 63 - RNA, 25 nt, synthetic construct
  source 1..25: mol_type = other RNA
  modified_base 1: mod_base = OTHER; note = 5'-methyluridine-3'-phosphate
  modified_base 5: mod_base = OTHER; note = 5'-methyluridine-3'-phosphate
  modified_base 20: mod_base = OTHER; note = 5'-methyluridine-3'-phosphate
  modified_base 21: mod_base = OTHER; note = 5'-methyluridine-3'-phosphate
tgcgtcaaacagcgacaagttccgc

SEQ ID NO: 64 - RNA, 26 nt, synthetic construct
  source 1..26: mol_type = other RNA
  modified_base 7: mod_base = OTHER; note = 5'-methyluridine-3'-phosphate
  modified_base 14: mod_base = OTHER; note = 5'-methyluridine-3'-phosphate
  modified_base 20: mod_base = OTHER; note = 5'-methyluridine-3'-phosphate
  modified_base 21: mod_base = OTHER; note = 5'-methyluridine-3'-phosphate
  modified_base 24: mod_base = OTHER; note = 5'-methyluridine-3'-phosphate
  modified_base 26: mod_base = OTHER; note = 5'-methyluridine
cccacgtaaaagatgacgcttggtgt

SEQ ID NO: 65 - RNA, 24 nt, synthetic construct
  source 1..24: mol_type = other RNA
  modified_base 2: mod_base = OTHER; note = 5'-methyluridine-3'-phosphate
  modified_base 9: mod_base = OTHER; note = 5'-methyluridine-3'-phosphate
  modified_base 15: mod_base = OTHER; note = 5'-methyluridine-3'-phosphate
  modified_base 16: mod_base = OTHER; note = 5'-methyluridine-3'-phosphate
  modified_base 19: mod_base = OTHER; note = 5'-methyluridine-3'-phosphate
  modified_base 21: mod_base = OTHER; note = 5'-methyluridine-3'-phosphate
  modified_base 23: mod_base = OTHER; note = 5'-methyluridine-3'-phosphate
gtaaaagatgacgcttggtgtgtc

SEQ ID NO: 66 - RNA, 26 nt, synthetic construct
  source 1..26: mol_type = other RNA
  modified_base 2: mod_base = OTHER; note = 5'-methyluridine-3'-phosphate
  modified_base 3: mod_base = OTHER; note = 5'-methyluridine-3'-phosphate
  modified_base 6: mod_base = OTHER; note = 5'-methyluridine-3'-phosphate
  modified_base 8: mod_base = OTHER; note = 5'-methyluridine-3'-phosphate
  modified_base 14: mod_base = OTHER; note = 5'-methyluridine-3'-phosphate
  modified_base 17: mod_base = OTHER; note = 5'-methyluridine-3'-phosphate
  modified_base 21: mod_base = OTHER; note = 5'-methyluridine-3'-phosphate
cttgctctcacagtactcgctgaggg

SEQ ID NO: 67 - RNA, 58 nt, synthetic construct; identical to SEQ ID NO: 54
  source 1..58: mol_type = other RNA
  modified_base 1: mod_base = OTHER; note = 5'-methyluridine-3'-phosphate
  modified_base 5: mod_base = OTHER; note = 5'-methyluridine-3'-phosphate
  modified_base 11: mod_base = OTHER; note = 5'-methyluridine-3'-phosphate
  modified_base 27: mod_base = OTHER; note = 5'-methyluridine

SEQ ID NO: 68 - RNA, 27 nt, synthetic construct
  source 1..27: mol_type = other RNA
  modified_base 1: mod_base = OTHER; note = 5'-methyluridine-3'-phosphate
  modified_base 2: mod_base = OTHER; note = 5'-methyluridine-3'-phosphate
  modified_base 5: mod_base = OTHER; note = 5'-methyluridine-3'-phosphate
  modified_base 6: mod_base = OTHER; note = 5'-methyluridine-3'-phosphate
  modified_base 7: mod_base = OTHER; note = 5'-methyluridine-3'-phosphate
  modified_base 11: mod_base = OTHER; note = 5'-methyluridine-3'-phosphate
  modified_base 13: mod_base = OTHER; note = 5'-methyluridine-3'-phosphate
  modified_base 16: mod_base = OTHER; note = 5'-methyluridine-3'-phosphate
  modified_base 17: mod_base = OTHER; note = 5'-methyluridine-3'-phosphate
  modified_base 18: mod_base = OTHER; note = 5'-methyluridine-3'-phosphate
  modified_base 20: mod_base = OTHER; note = 5'-methyluridine-3'-phosphate
  modified_base 22: mod_base = OTHER; note = 5'-methyluridine-3'-phosphate
ttactttccctctcatttctctgaccg

SEQ ID NO: 69 - RNA, 25 nt, synthetic construct
  source 1..25: mol_type = other RNA
  modified_base 1: mod_base = OTHER; note = 5'-methyluridine-3'-phosphate
  modified_base 5: mod_base = OTHER; note = 5'-methyluridine-3'-phosphate
  modified_base 7: mod_base = OTHER; note = 5'-methyluridine-3'-phosphate
  modified_base 10: mod_base = OTHER; note = 5'-methyluridine-3'-phosphate
  modified_base 11: mod_base = OTHER; note = 5'-methyluridine-3'-phosphate
  modified_base 12: mod_base = OTHER; note = 5'-methyluridine-3'-phosphate
  modified_base 14: mod_base = OTHER; note = 5'-methyluridine-3'-phosphate
  modified_base 16: mod_base = OTHER; note = 5'-methyluridine-3'-phosphate
tccctctcatttctctgaccgaagc

SEQ ID NO: 70 - RNA, 35 nt, synthetic construct
  source 1..35: mol_type = other RNA
  modified_base 5: mod_base = OTHER; note = 5'-methyluridine-3'-phosphate
  modified_base 12: mod_base = OTHER; note = 5'-methyluridine-3'-phosphate
  modified_base 13: mod_base = OTHER; note = 5'-methyluridine-3'-phosphate
  modified_base 14: mod_base = OTHER; note = 5'-methyluridine-3'-phosphate
  modified_base 25: mod_base = OTHER; note = 5'-methyluridine-3'-phosphate
  modified_base 26: mod_base = OTHER; note = 5'-methyluridine-3'-phosphate
cgcctgcacaatttcagcccaagcttctagagagt

SEQ ID NO: 71 - RNA, 25 nt, synthetic construct
  source 1..25: mol_type = other RNA
  modified_base 7: mod_base = OTHER; note = 5'-methyluridine-3'-phosphate
  modified_base 8: mod_base = OTHER; note = 5'-methyluridine-3'-phosphate
  modified_base 10: mod_base = OTHER; note = 5'-methyluridine-3'-phosphate
  modified_base 17: mod_base = OTHER; note = 5'-methyluridine-3'-phosphate
  modified_base 20: mod_base = OTHER; note = 5'-methyluridine-3'-phosphate
  modified_base 23: mod_base = OTHER; note = 5'-methyluridine-3'-phosphate
ccaagcttctagagagtggtgatga

SEQ ID NO: 72 - RNA, 26 nt, synthetic construct
  source 1..26: mol_type = other RNA
  modified_base 1: mod_base = OTHER; note = 5'-methyluridine-3'-phosphate
  modified_base 8: mod_base = OTHER; note = 5'-methyluridine-3'-phosphate
  modified_base 11: mod_base = OTHER; note = 5'-methyluridine-3'-phosphate
  modified_base 14: mod_base = OTHER; note = 5'-methyluridine-3'-phosphate
  modified_base 18: mod_base = OTHER; note = 5'-methyluridine-3'-phosphate
  modified_base 19: mod_base = OTHER; note = 5'-methyluridine-3'-phosphate
  modified_base 23: mod_base = OTHER; note = 5'-methyluridine-3'-phosphate
  modified_base 25: mod_base = OTHER; note = 5'-methyluridine-3'-phosphate
tagagagtggtgatgacttgcatatg

SEQ ID NO: 73 - RNA, 28 nt, synthetic construct
  source 1..28: mol_type = other RNA
  modified_base 6: mod_base = OTHER; note = 5'-methyluridine-3'-phosphate
  modified_base 11: mod_base = OTHER; note = 5'-methyluridine-3'-phosphate
  modified_base 14: mod_base = OTHER; note = 5'-methyluridine-3'-phosphate
  modified_base 15: mod_base = OTHER; note = 5'-methyluridine-3'-phosphate
  modified_base 18: mod_base = OTHER; note = 5'-methyluridine-3'-phosphate
  modified_base 19: mod_base = OTHER; note = 5'-methyluridine-3'-phosphate
  modified_base 26: mod_base = OTHER; note = 5'-methyluridine-3'-phosphate
ggacatgacctggttgcttcacagctcc

SEQ ID NO: 74 - RNA, 24 nt, synthetic construct
  source 1..24: mol_type = other RNA
  modified_base 2: mod_base = OTHER; note = 5'-methyluridine-3'-phosphate
  modified_base 9: mod_base = OTHER; note = 5'-methyluridine-3'-phosphate
  modified_base 19: mod_base = OTHER; note = 5'-methyluridine-3'-phosphate
  modified_base 20: mod_base = OTHER; note = 5'-methyluridine-3'-phosphate
  modified_base 23: mod_base = OTHER; note = 5'-methyluridine-3'-phosphate
  modified_base 24: mod_base = OTHER; note = 5'-methyluridine
ctccgagatgacacagacttgctt

SEQ ID NO: 75 - RNA, 27 nt, synthetic construct
  source 1..27: mol_type = other RNA
  modified_base 5: mod_base = OTHER; note = 5'-methyluridine-3'-phosphate
  modified_base 15: mod_base = OTHER; note = 5'-methyluridine-3'-phosphate
  modified_base 16: mod_base = OTHER; note = 5'-methyluridine-3'-phosphate
  modified_base 19: mod_base = OTHER; note = 5'-methyluridine-3'-phosphate
  modified_base 20: mod_base = OTHER; note = 5'-methyluridine-3'-phosphate
gagatgacacagacttgcttaaaggaa

SEQ ID NO: 76 - RNA, 24 nt, synthetic construct
  source 1..24: mol_type = other RNA
  modified_base 4: mod_base = OTHER; note = 5'-methyluridine-3'-phosphate
  modified_base 19: mod_base = OTHER; note = 5'-methyluridine-3'-phosphate
  modified_base 20: mod_base = OTHER; note = 5'-methyluridine-3'-phosphate
gcgtcaaacagcgacaagttccgc

SEQ ID NO: 77 - RNA, 24 nt, synthetic construct
  source 1..24: mol_type = other RNA
  modified_base 2: mod_base = OTHER; note = 5'-methyluridine-3'-phosphate
  modified_base 9: mod_base = OTHER; note = 5'-methyluridine-3'-phosphate
  modified_base 15: mod_base = OTHER; note = 5'-methyluridine-3'-phosphate
  modified_base 16: mod_base = OTHER; note = 5'-methyluridine-3'-phosphate
  modified_base 19: mod_base = OTHER; note = 5'-methyluridine-3'-phosphate
  modified_base 21: mod_base = OTHER; note = 5'-methyluridine-3'-phosphate
  modified_base 23: mod_base = OTHER; note = 5'-methyluridine-3'-phosphate
gtaaaagatgacgcttggtgtgtc

SEQ ID NO: 78 - RNA, 48 nt, synthetic construct
  source 1..48: mol_type = other RNA
  modified_base 1: mod_base = OTHER; note = 5'-methyluridine-3'-phosphate
  modified_base 17: mod_base = OTHER; note = 5'-methyluridine-3'-phosphate
  modified_base 20: mod_base = OTHER; note = 5'-methyluridine-3'-phosphate
  modified_base 26: mod_base = OTHER; note = 5'-methyluridine-3'-phosphate
  modified_base 27: mod_base = OTHER; note = 5'-methyluridine
tgaacaagaaaagacctgataaagattaaccagaagaaaacaaggagg

SEQ ID NO: 79 - RNA, 25 nt, synthetic construct
  source 1..25: mol_type = other RNA
  modified_base 1: mod_base = OTHER; note = 5'-methyluridine-3'-phosphate
  modified_base 2: mod_base = OTHER; note = 5'-methyluridine-3'-phosphate
  modified_base 5: mod_base = OTHER; note = 5'-methyluridine-3'-phosphate
  modified_base 6: mod_base = OTHER; note = 5'-methyluridine-3'-phosphate
  modified_base 7: mod_base = OTHER; note = 5'-methyluridine-3'-phosphate
  modified_base 11: mod_base = OTHER; note = 5'-methyluridine-3'-phosphate
  modified_base 13: mod_base = OTHER; note = 5'-methyluridine-3'-phosphate
  modified_base 16: mod_base = OTHER; note = 5'-methyluridine-3'-phosphate
  modified_base 17: mod_base = OTHER; note = 5'-methyluridine-3'-phosphate
  modified_base 18: mod_base = OTHER; note = 5'-methyluridine-3'-phosphate
  modified_base 20: mod_base = OTHER; note = 5'-methyluridine-3'-phosphate
  modified_base 22: mod_base = OTHER; note = 5'-methyluridine-3'-phosphate
ttactttccctctcatttctctgac

SEQ ID NO: 80 - RNA, 24 nt, synthetic construct
  source 1..24: mol_type = other RNA
  modified_base 7: mod_base = OTHER; note = 5'-methyluridine-3'-phosphate
  modified_base 8: mod_base = OTHER; note = 5'-methyluridine-3'-phosphate
  modified_base 10: mod_base = OTHER; note = 5'-methyluridine-3'-phosphate
  modified_base 17: mod_base = OTHER; note = 5'-methyluridine-3'-phosphate
  modified_base 20: mod_base = OTHER; note = 5'-methyluridine-3'-phosphate
  modified_base 23: mod_base = OTHER; note = 5'-methyluridine-3'-phosphate
ccaagcttctagagagtggtgatg

SEQ ID NO: 81 - RNA, 24 nt, synthetic construct
  source 1..24: mol_type = other RNA
  modified_base 2: mod_base = OTHER; note = 5'-methyluridine-3'-phosphate
  modified_base 7: mod_base = OTHER; note = 5'-methyluridine-3'-phosphate
  modified_base 10: mod_base = OTHER; note = 5'-methyluridine-3'-phosphate
  modified_base 11: mod_base = OTHER; note = 5'-methyluridine-3'-phosphate
  modified_base 14: mod_base = OTHER; note = 5'-methyluridine-3'-phosphate
  modified_base 15: mod_base = OTHER; note = 5'-methyluridine-3'-phosphate
  modified_base 22: mod_base = OTHER; note = 5'-methyluridine-3'-phosphate
atgacctggttgcttcacagctcc

SEQ ID NO: 82 - RNA, 24 nt, synthetic construct
  source 1..24: mol_type = other RNA
  modified_base 2: mod_base = OTHER; note = 5'-methyluridine-3'-phosphate
  modified_base 9: mod_base = OTHER; note = 5'-methyluridine-3'-phosphate
  modified_base 19: mod_base = OTHER; note = 5'-methyluridine-3'-phosphate
  modified_base 20: mod_base = OTHER; note = 5'-methyluridine-3'-phosphate
  modified_base 23: mod_base = OTHER; note = 5'-methyluridine-3'-phosphate
  modified_base 24: mod_base = OTHER; note = 5'-methyluridine
ctccgagatgacacagacttgctt

SEQ ID NO: 83 - RNA, 26 nt, synthetic construct
  source 1..26: mol_type = other RNA
  modified_base 5: mod_base = OTHER; note = 5'-methyluridine-3'-phosphate
  modified_base 15: mod_base = OTHER; note = 5'-methyluridine-3'-phosphate
  modified_base 16: mod_base = OTHER; note = 5'-methyluridine-3'-phosphate
  modified_base 19: mod_base = OTHER; note = 5'-methyluridine-3'-phosphate
  modified_base 20: mod_base = OTHER; note = 5'-methyluridine-3'-phosphate
gagatgacacagacttgcttaaagga

SEQ ID NO: 84 - RNA, 24 nt, synthetic construct
  source 1..24: mol_type = other RNA
  modified_base 4: mod_base = OTHER; note = 5'-methyluridine-3'-phosphate
  modified_base 19: mod_base = OTHER; note = 5'-methyluridine-3'-phosphate
  modified_base 20: mod_base = OTHER; note = 5'-methyluridine-3'-phosphate
gcgtcaaacagcgacaagttccgc

SEQ ID NO: 85 - RNA, 48 nt, synthetic construct; identical to SEQ ID NO: 78
  source 1..48: mol_type = other RNA
  modified_base 1: mod_base = OTHER; note = 5'-methyluridine-3'-phosphate
  modified_base 17: mod_base = OTHER; note = 5'-methyluridine-3'-phosphate
  modified_base 20: mod_base = OTHER; note = 5'-methyluridine-3'-phosphate
  modified_base 26: mod_base = OTHER; note = 5'-methyluridine-3'-phosphate
  modified_base 27: mod_base = OTHER; note = 5'-methyluridine

SEQ ID NO: 86 - RNA, 24 nt, synthetic construct
  source 1..24: mol_type = other RNA
  modified_base 1: mod_base = OTHER; note = 5'-methyluridine-3'-phosphate
  modified_base 2: mod_base = OTHER; note = 5'-methyluridine-3'-phosphate
  modified_base 5: mod_base = OTHER; note = 5'-methyluridine-3'-phosphate
  modified_base 6: mod_base = OTHER; note = 5'-methyluridine-3'-phosphate
  modified_base 7: mod_base = OTHER; note = 5'-methyluridine-3'-phosphate
  modified_base 11: mod_base = OTHER; note = 5'-methyluridine-3'-phosphate
  modified_base 13: mod_base = OTHER; note = 5'-methyluridine-3'-phosphate
  modified_base 16: mod_base = OTHER; note = 5'-methyluridine-3'-phosphate
  modified_base 17: mod_base = OTHER; note = 5'-methyluridine-3'-phosphate
  modified_base 18: mod_base = OTHER; note = 5'-methyluridine-3'-phosphate
  modified_base 20: mod_base = OTHER; note = 5'-methyluridine-3'-phosphate
  modified_base 22: mod_base = OTHER; note = 5'-methyluridine-3'-phosphate
ttactttccctctcatttctctga

SEQ ID NO: 87 - RNA, 24 nt, synthetic construct
  source 1..24: mol_type = other RNA
  modified_base 2: mod_base = OTHER; note = 5'-methyluridine-3'-phosphate
  modified_base 7: mod_base = OTHER; note = 5'-methyluridine-3'-phosphate
  modified_base 10: mod_base = OTHER; note = 5'-methyluridine-3'-phosphate
  modified_base 11: mod_base = OTHER; note = 5'-methyluridine-3'-phosphate
  modified_base 14: mod_base = OTHER; note = 5'-methyluridine-3'-phosphate
  modified_base 15: mod_base = OTHER; note = 5'-methyluridine-3'-phosphate
  modified_base 22: mod_base = OTHER; note = 5'-methyluridine-3'-phosphate
atgacctggttgcttcacagctcc

SEQ ID NO: 88 - RNA, 24 nt, synthetic construct
  source 1..24: mol_type = other RNA
  modified_base 2: mod_base = OTHER; note = 5'-methyluridine-3'-phosphate
  modified_base 9: mod_base = OTHER; note = 5'-methyluridine-3'-phosphate
  modified_base 19: mod_base = OTHER; note = 5'-methyluridine-3'-phosphate
  modified_base 20: mod_base = OTHER; note = 5'-methyluridine-3'-phosphate
  modified_base 23: mod_base = OTHER; note = 5'-methyluridine-3'-phosphate
  modified_base 24: mod_base = OTHER; note = 5'-methyluridine
ctccgagatgacacagacttgctt

SEQ ID NO: 89 - RNA, 26 nt, synthetic construct
  source 1..26: mol_type = other RNA
  modified_base 5: mod_base = OTHER; note = 5'-methyluridine-3'-phosphate
  modified_base 15: mod_base = OTHER; note = 5'-methyluridine-3'-phosphate
  modified_base 16: mod_base = OTHER; note = 5'-methyluridine-3'-phosphate
  modified_base 19: mod_base = OTHER; note = 5'-methyluridine-3'-phosphate
  modified_base 20: mod_base = OTHER; note = 5'-methyluridine-3'-phosphate
gagatgacacagacttgcttaaagga

SEQ ID NO: 90 - RNA, 24 nt, synthetic construct
  source 1..24: mol_type = other RNA
  modified_base 11: mod_base = OTHER; note = 5'-methyluridine-3'-phosphate
  modified_base 14: mod_base = OTHER; note = 5'-methyluridine-3'-phosphate
  modified_base 20: mod_base = OTHER; note = 5'-methyluridine-3'-phosphate
  modified_base 21: mod_base = OTHER; note = 5'-methyluridine-3'-phosphate
agaaaagacctgataaagattaac

SEQ ID NO: 91 - RNA, 24 nt, synthetic construct
  source 1..24: mol_type = other RNA
  modified_base 7: mod_base = OTHER; note = 5'-methyluridine-3'-phosphate
  modified_base 10: mod_base = OTHER; note = 5'-methyluridine-3'-phosphate
  modified_base 16: mod_base = OTHER; note = 5'-methyluridine-3'-phosphate
  modified_base 17: mod_base = OTHER; note = 5'-methyluridine-3'-phosphate
aagacctgataaagattaaccaga

SEQ ID NO: 92 - RNA, 24 nt, synthetic construct
  source 1..24: mol_type = other RNA
  modified_base 1: mod_base = OTHER; note = 5'-methyluridine-3'-phosphate
  modified_base 2: mod_base = OTHER; note = 5'-methyluridine-3'-phosphate
  modified_base 5: mod_base = OTHER; note = 5'-methyluridine-3'-phosphate
  modified_base 6: mod_base = OTHER; note = 5'-methyluridine-3'-phosphate
  modified_base 7: mod_base = OTHER; note = 5'-methyluridine-3'-phosphate
  modified_base 11: mod_base = OTHER; note = 5'-methyluridine-3'-phosphate
  modified_base 13: mod_base = OTHER; note = 5'-methyluridine-3'-phosphate
  modified_base 16: mod_base = OTHER; note = 5'-methyluridine-3'-phosphate
  modified_base 17: mod_base = OTHER; note = 5'-methyluridine-3'-phosphate
  modified_base 18: mod_base = OTHER; note = 5'-methyluridine-3'-phosphate
  modified_base 20: mod_base = OTHER; note = 5'-methyluridine-3'-phosphate
  modified_base 22: mod_base = OTHER; note = 5'-methyluridine-3'-phosphate
ttactttccctctcatttctctga

SEQ ID NO: 93 - RNA, 24 nt, synthetic construct
  source 1..24: mol_type = other RNA
  modified_base 2: mod_base = OTHER; note = 5'-methyluridine-3'-phosphate
  modified_base 9: mod_base = OTHER; note = 5'-methyluridine-3'-phosphate
  modified_base 19: mod_base = OTHER; note = 5'-methyluridine-3'-phosphate
  modified_base 20: mod_base = OTHER; note = 5'-methyluridine-3'-phosphate
  modified_base 23: mod_base = OTHER; note = 5'-methyluridine-3'-phosphate
  modified_base 24: mod_base = OTHER; note = 5'-methyluridine
ctccgagatgacacagacttgctt

SEQ ID NO: 94 - RNA, 21 nt, synthetic construct
  source 1..21: mol_type = other RNA
aaaaaaaaaaaaaaaaaaaaa

SEQ ID NO: 95 - RNA, 21 nt, synthetic construct
  source 1..21: mol_type = other RNA
aaaaaaaaaaaaaaaaaaaaa

SEQ ID NO: 96 - RNA, 21 nt, synthetic construct
  source 1..21: mol_type = other RNA
aaaaaaaaaaaaaaaaaaaaa

SEQ ID NO: 97 - RNA, 21 nt, synthetic construct
  source 1..21: mol_type = other RNA
aaaaaaaaaaaaaaaaaaaaa

SEQ ID NO: 98 - RNA, 21 nt, synthetic construct
  source 1..21: mol_type = other RNA
aaaaaaaaaaaaaaaaaaaaa

SEQ ID NO: 99 - RNA, 21 nt, synthetic construct
  source 1..21: mol_type = other RNA
aaaaaaaaaaaaaaaaaaaaa

SEQ ID NO: 100-108 - skipped (9 entries)

SEQ ID NO: 109 - RNA, 21 nt, synthetic construct
  source 1..21: mol_type = other RNA
ccgaggctcccttttctcgaa

SEQ ID NO: 110 - RNA, 21 nt, synthetic construct
  source 1..21: mol_type = other RNA
aggcaattccaccagtcgcta

SEQ ID NO: 111 - RNA, 21 nt, synthetic construct
  source 1..21: mol_type = other RNA
caccagtcgctagaggcgaaa

SEQ ID NO: 112 - RNA, 21 nt, synthetic construct
  source 1..21: mol_type = other RNA
accagtcgctagaggcgaaaa

SEQ ID NO: 113 - RNA, 21 nt, synthetic construct
  source 1..21: mol_type = other RNA
cacccagcttcggtcagagaa

SEQ ID NO: 114 - RNA, 21 nt, synthetic construct
  source 1..21: mol_type = other RNA
cccagcttcggtcagagaaaa

SEQ ID NO: 115 - RNA, 21 nt, synthetic construct
  source 1..21: mol_type = other RNA
cagcttcggtcagagaaatga

SEQ ID NO: 116 - RNA, 21 nt, synthetic construct
  source 1..21: mol_type = other RNA
gcttcggtcagagaaatgaga

SEQ ID NO: 117 - RNA, 21 nt, synthetic construct
  source 1..21: mol_type = other RNA
tcggtcagagaaatgagagga

SEQ ID NO: 118 - RNA, 21 nt, synthetic construct
  source 1..21: mol_type = other RNA
ggtcagagaaatgagagggaa

SEQ ID NO: 119 - RNA, 21 nt, synthetic construct
  source 1..21: mol_type = other RNA
tcagagaaatgagagggaaaa

SEQ ID NO: 120 - RNA, 21 nt, synthetic construct
  source 1..21: mol_type = other RNA
agagggaaagtaaaaatgcga

SEQ ID NO: 121 - RNA, 21 nt, synthetic construct
  source 1..21: mol_type = other RNA
gagggaaagtaaaaatgcgta

SEQ ID NO: 122 - RNA, 21 nt, synthetic construct
  source 1..21: mol_type = other RNA
agggaaagtaaaaatgcgtca

SEQ ID NO: 123 - RNA, 21 nt, synthetic construct
  source 1..21: mol_type = other RNA
gggaaagtaaaaatgcgtcga

SEQ ID NO: 124 - RNA, 21 nt, synthetic construct
  source 1..21: mol_type = other RNA
ggaaagtaaaaatgcgtcgaa

SEQ ID NO: 125 - RNA, 21 nt, synthetic construct
  source 1..21: mol_type = other RNA
gaaagtaaaaatgcgtcgaga

SEQ ID NO: 126 - RNA, 21 nt, synthetic construct
  source 1..21: mol_type = other RNA
aaagtaaaaatgcgtcgagca

SEQ ID NO: 127 - RNA, 21 nt, synthetic construct
  source 1..21: mol_type = other RNA
aagtaaaaatgcgtcgagcta

SEQ ID NO: 128 - RNA, 21 nt, synthetic construct
  source 1..21: mol_type = other RNA
agtaaaaatgcgtcgagctca

SEQ ID NO: 129 - RNA, 21 nt, synthetic construct
  source 1..21: mol_type = other RNA
cgactcctgagttccagagca

SEQ ID NO: 130 - RNA, 21 nt, synthetic construct
  source 1..21: mol_type = other RNA
gactcctgagttccagagcta

SEQ ID NO: 131 - RNA, 21 nt, synthetic construct
  source 1..21: mol_type = other RNA
actcctgagttccagagctta

SEQ ID NO: 132 - RNA, 21 nt, synthetic construct
  source 1..21: mol_type = other RNA
ctcctgagttccagagcttga

SEQ ID NO: 133 - RNA, 21 nt, synthetic construct
  source 1..21: mol_type = other RNA
tcctgagttccagagcttgca

SEQ ID NO: 134 - RNA, 21 nt, synthetic construct
  source 1..21: mol_type = other RNA
cctgagttccagagcttgcta

SEQ ID NO: 135 - RNA, 21 nt, synthetic construct
  source 1..21: mol_type = other RNA
gagttccagagcttgctacaa

SEQ ID NO: 136 - RNA, 21 nt, synthetic construct
  source 1..21: mol_type = other RNA
agttccagagcttgctacaga

SEQ ID NO: 137 - RNA, 21 nt, synthetic construct
  source 1..21: mol_type = other RNA
gttccagagcttgctacagga

SEQ ID NO: 138 - RNA, 21 nt, synthetic construct
  source 1..21: mol_type = other RNA
ttccagagcttgctacaggca

SEQ ID NO: 139 - RNA, 21 nt, synthetic construct
  source 1..21: mol_type = other RNA
tccagagcttgctacaggcta

SEQ ID NO: 140 - RNA, 21 nt, synthetic construct
  source 1..21: mol_type = other RNA
ccagagcttgctacaggctga

SEQ ID NO: 141 - RNA, 21 nt, synthetic construct
  source 1..21: mol_type = other RNA
cagagcttgctacaggctgca

SEQ ID NO: 142 - RNA, 21 nt, synthetic construct
  source 1..21: mol_type = other RNA
tacaggctgcggttgtttcca

SEQ ID NO: 143 - RNA, 21 nt, synthetic construct
  source 1..21: mol_type = other RNA
gctgcggttgtttccctccta

SEQ ID NO: 144 - RNA, 21 nt, synthetic construct
  source 1..21: mol_type = other RNA
ctgcggttgtttccctcctta

SEQ ID NO: 145 - RNA, 21 nt, synthetic construct
  source 1..21: mol_type = other RNA
gcggttgtttccctccttgta

SEQ ID NO: 146 - RNA, 21 nt, synthetic construct
  source 1..21: mol_type = other RNA
cggttgtttccctccttgtta

SEQ ID NO: 147 - RNA, 21 nt, synthetic construct
  source 1..21: mol_type = other RNA
gttgtttccctccttgtttta

SEQ ID NO: 148 - RNA, 21 nt, synthetic construct
  source 1..21: mol_type = other RNA
ttgtttccctccttgttttca

SEQ ID NO: 149 - RNA, 21 nt, synthetic construct
  source 1..21: mol_type = other RNA
ttccctccttgttttcttcta

SEQ ID NO: 150 - RNA, 21 nt, synthetic construct
  source 1..21: mol_type = other RNA
tccctccttgttttcttctga

SEQ ID NO: 151 - RNA, 21 nt, synthetic construct
  source 1..21: mol_type = other RNA
ccctccttgttttcttctgga

SEQ ID NO: 152 - RNA, 21 nt, synthetic construct
  source 1..21: mol_type = other RNA
cctccttgttttcttctggta

SEQ ID NO: 153 - RNA, 21 nt, synthetic construct
  source 1..21: mol_type = other RNA
ctccttgttttcttctggtta

SEQ ID NO: 154 - RNA, 21 nt, synthetic construct
  source 1..21: mol_type = other RNA
ccttgttttcttctggttaaa

SEQ ID NO: 155 - RNA, 21 nt, synthetic construct
  source 1..21: mol_type = other RNA
cttgttttcttctggttaata

SEQ ID NO: 156 - RNA, 21 nt, synthetic construct
  source 1..21: mol_type = other RNA
ttgttttcttctggttaatca

SEQ ID NO: 157 - RNA, 21 nt, synthetic construct
  source 1..21: mol_type = other RNA
tgttttcttctggttaatcta

SEQ ID NO: 158 - RNA, 21 nt, synthetic construct
  source 1..21: mol_type = other RNA
gttttcttctggttaatctta

SEQ ID NO: 159 - RNA, 21 nt, synthetic construct
  source 1..21: mol_type = other RNA
ttcttctggttaatctttata

SEQ ID NO: 160 - RNA, 21 nt, synthetic construct
  source 1..21: mol_type = other RNA
tcttctggttaatctttatca

SEQ ID NO: 161 - RNA, 21 nt, synthetic construct
  source 1..21: mol_type = other RNA
cttctggttaatctttatcaa

SEQ ID NO: 162 - RNA, 21 nt, synthetic construct
  source 1..21: mol_type = other RNA
ttctggttaatctttatcaga

SEQ ID NO: 163 - RNA, 21 nt, synthetic construct
  source 1..21: mol_type = other RNA
tctggttaatctttatcagga

SEQ ID NO: 164 - RNA, 21 nt, synthetic construct
  source 1..21: mol_type = other RNA
ctggttaatctttatcaggta

SEQ ID NO: 165 - RNA, 21 nt, synthetic construct
  source 1..21: mol_type = other RNA
tggttaatctttatcaggtca

SEQ ID NO: 166 - RNA, 21 nt, synthetic construct
  source 1..21: mol_type = other RNA
gttaatctttatcaggtctta

SEQ ID NO: 167 - RNA, 21 nt, synthetic construct
  source 1..21: mol_type = other RNA
ttaatctttatcaggtcttta

SEQ ID NO: 168 - RNA, 21 nt, synthetic construct
  source 1..21: mol_type = other RNA
aatctttatcaggtcttttca

SEQ ID NO: 169 - RNA, 21 nt, synthetic construct
  source 1..21: mol_type = other RNA
atctttatcaggtcttttcta

SEQ ID NO: 170 - RNA, 21 nt, synthetic construct
  source 1..21: mol_type = other RNA
tctttatcaggtcttttctta

SEQ ID NO: 171 - RNA, 21 nt, synthetic construct
  source 1..21: mol_type = other RNA
ctttatcaggtcttttcttga

SEQ ID NO: 172 - RNA, 21 nt, synthetic construct
  source 1..21: mol_type = other RNA
tttatcaggtcttttcttgta

SEQ ID NO: 173 - RNA, 21 nt, synthetic construct
  source 1..21: mol_type = other RNA
ttatcaggtcttttcttgtta

SEQ ID NO: 174 - RNA, 21 nt, synthetic construct
  source 1..21: mol_type = other RNA
tatcaggtcttttcttgttca

SEQ ID NO: 175 - RNA, 21 nt, synthetic construct
  source 1..21: mol_type = other RNA
atcaggtcttttcttgttcaa

SEQ ID NO: 176 - RNA, 21 nt, synthetic construct
  source 1..21: mol_type = other RNA
tcaggtcttttcttgttcaca

SEQ ID NO: 177 - RNA, 21 nt, synthetic construct
  source 1..21: mol_type = other RNA
caggtcttttcttgttcacca

SEQ ID NO: 178 - RNA, 21 nt, synthetic construct
  source 1..21: mol_type = other RNA
ggtcttttcttgttcacccta

SEQ ID NO: 179 - RNA, 21 nt, synthetic construct
  source 1..21: mol_type = other RNA
tcttttcttgttcaccctcaa

SEQ ID NO: 180 - RNA, 21 nt, synthetic construct
  source 1..21: mol_type = other RNA
cttttcttgttcaccctcaga

SEQ ID NO: 181 - RNA, 21 nt, synthetic construct
  source 1..21: mol_type = other RNA
ttttcttgttcaccctcagca

SEQ ID NO: 182 - RNA, 21 nt, synthetic construct
  source 1..21: mol_type = other RNA
ttcttgttcaccctcagcgaa

SEQ ID NO: 183 - RNA, 21 nt, synthetic construct
  source 1..21: mol_type = other RNA
cctcagcgagtactgtgagaa

SEQ ID NO: 184 - RNA, 21 nt, synthetic construct
  source 1..21: mol_type = other RNA
tcagcgagtactgtgagagca

SEQ ID NO: 185 - RNA, 21 nt, synthetic construct
  source 1..21: mol_type = other RNA
cagcgagtactgtgagagcaa

SEQ ID NO: 186 - RNA, 21 nt, synthetic construct
  source 1..21: mol_type = other RNA
agcgagtactgtgagagcaaa

SEQ ID NO: 187 - RNA, 21 nt, synthetic construct
  source 1..21: mol_type = other RNA
gcgagtactgtgagagcaaga

SEQ ID NO: 188 - RNA, 21 nt, synthetic construct
  source 1..21: mol_type = other RNA
cgagtactgtgagagcaagta

SEQ ID NO: 189 - RNA, 21 nt, synthetic construct
  source 1..21: mol_type = other RNA
gagtactgtgagagcaagtaa

SEQ ID NO: 190 - RNA, 21 nt, synthetic construct
  source 1..21: mol_type = other RNA
agtactgtgagagcaagtaga

SEQ ID NO: 191 - RNA, 21 nt, synthetic construct
  source 1..21: mol_type = other RNA
tactgtgagagcaagtagtga

SEQ ID NO: 192 - RNA, 21 nt, synthetic construct
  source 1..21: mol_type = other RNA
aaaacaaaaacacacacctca

SEQ ID NO: 193 - RNA, 21 nt, synthetic construct
  source 1..21: mol_type = other RNA
acacctcctaaacccacacca

SEQ ID NO: 194 - RNA, 21 nt, synthetic construct
  source 1..21: mol_type = other RNA
acctcctaaacccacacctga

SEQ ID NO: 195 - RNA, 21 nt, synthetic construct
  source 1..21: mol_type = other RNA
ctcctaaacccacacctgcta

SEQ ID NO: 196 - RNA, 21 nt, synthetic construct
  source 1..21: mol_type = other RNA
ccacacctgctcttgctagaa

SEQ ID NO: 197 - RNA, 21 nt, synthetic construct
  source 1..21: mol_type = other RNA
cacacctgctcttgctagaca

SEQ ID NO: 198 - RNA, 21 nt, synthetic construct
  source 1..21: mol_type = other RNA
acacctgctcttgctagacca

SEQ ID NO: 199 - RNA, 23 nt, synthetic construct
  source 1..23: mol_type = other RNA
ttcgagaaaagggagcctcgggt

SEQ ID NO: 200 - RNA, 23 nt, synthetic construct
  source 1..23: mol_type = other RNA
tagcgactggtggaattgcctgc

SEQ ID NO: 201 - RNA, 23 nt, synthetic construct
  source 1..23: mol_type = other RNA
  modified_base 1: mod_base = OTHER; note = 2'-O-methyluridine-3'-phosphate
  modified_base 2: mod_base = OTHER; note = 2'-O-methyluridine-3'-phosphate
  modified_base 3: mod_base = OTHER; note = 2'-O-methyluridine-3'-phosphate
  modified_base 4: mod_base = OTHER; note = 2'-O-methylcytidine-3'-phosphate
  modified_base 5: mod_base = OTHER; note = 2'-O-methylguanosine-3'-phosphate
  modified_base 6: mod_base = OTHER; note = 2'-O-methylcytidine-3'-phosphate
  modified_base 7: mod_base = OTHER; note = 2'-O-methylcytidine-3'-phosphate
  modified_base 8: mod_base = OTHER; note = 2'-O-methyluridine-3'-phosphate
  modified_base 9: mod_base = OTHER; note = 2'-O-methylcytidine-3'-phosphate
  modified_base 10: mod_base = OTHER; note = 2'-O-methyluridine-3'-phosphate
  modified_base 11: mod_base = OTHER; note = 2'-O-methyladenosine-3'-phosphate
  modified_base 12: mod_base = OTHER; note = 2'-O-methylguanosine-3'-phosphate
  modified_base 13: mod_base = OTHER; note = 2'-O-methylcytidine-3'-phosphate
  modified_base 14: mod_base = OTHER; note = 2'-O-methylguanosine-3'-phosphate
  modified_base 15: mod_base = OTHER; note = 2'-O-methyladenosine-3'-phosphate
  modified_base 16: mod_base = OTHER; note = 2'-O-methylcytidine-3'-phosphate
  modified_base 17: mod_base = OTHER; note = 2'-O-methyluridine-3'-phosphate
  modified_base 18: mod_base = OTHER; note = 2'-O-methylguanosine-3'-phosphate
  modified_base 19: mod_base = OTHER; note = 2'-O-methylguanosine-3'-phosphate
  modified_base 20: mod_base = OTHER; note = 2'-O-methyluridine-3'-phosphate
  modified_base 21: mod_base = OTHER; note = 2'-O-methylguanosine-3'-phosphate
  modified_base 22: mod_base = OTHER; note = 2'-O-methylguanosine-3'-phosphate
  modified_base 23: mod_base = OTHER; note = 2'-O-methyladenosine-3'-phosphate
tttcgcctctagcgactggtgga

SEQ ID NO: 202 - RNA, 23 nt, synthetic construct
  source 1..23: mol_type = other RNA
ttttcgcctctagcgactggtgg

SEQ ID NO: 203 - RNA, 23 nt, synthetic construct
  source 1..23: mol_type = other RNA
  modified_base 1: mod_base = OTHER; note = 2'-O-methyluridine-3'-phosphate
  modified_base 2: mod_base = OTHER; note = 2'-O-methyluridine-3'-phosphate
  modified_base 3: mod_base = OTHER; note = 2'-O-methylcytidine-3'-phosphate
  modified_base 4: mod_base = OTHER; note = 2'-O-methyluridine-3'-phosphate
  modified_base 5: mod_base = OTHER; note = 2'-O-methylcytidine-3'-phosphate
  modified_base 6: mod_base = OTHER; note = 2'-O-methyluridine-3'-phosphate
  modified_base 7: mod_base = OTHER; note = 2'-O-methylguanosine-3'-phosphate
  modified_base 8: mod_base = OTHER; note = 2'-O-methyladenosine-3'-phosphate
  modified_base 9: mod_base = OTHER; note = 2'-O-methylcytidine-3'-phosphate
  modified_base 10: mod_base = OTHER; note = 2'-O-methylcytidine-3'-phosphate
  modified_base 11: mod_base = OTHER; note = 2'-O-methylguanosine-3'-phosphate
  modified_base 12: mod_base = OTHER; note = 2'-O-methyladenosine-3'-phosphate
  modified_base 13: mod_base = OTHER; note = 2'-O-methyladenosine-3'-phosphate
  modified_base 14: mod_base = OTHER; note = 2'-O-methylguanosine-3'-phosphate
  modified_base 15: mod_base = OTHER; note = 2'-O-methylcytidine-3'-phosphate
  modified_base 16: mod_base = OTHER; note = 2'-O-methyluridine-3'-phosphate
  modified_base 17: mod_base = OTHER; note = 2'-O-methylguanosine-3'-phosphate
  modified_base 18: mod_base = OTHER; note = 2'-O-methylguanosine-3'-phosphate
  modified_base 19: mod_base = OTHER; note = 2'-O-methylguanosine-3'-phosphate
  modified_base 20: mod_base = OTHER; note = 2'-O-methyluridine-3'-phosphate
  modified_base 21: mod_base = OTHER; note = 2'-O-methylguanosine-3'-phosphate
  modified_base 22: mod_base = OTHER; note = 2'-O-methyluridine-3'-phosphate
  modified_base 23: mod_base = OTHER; note = 2'-O-methylcytidine-3'-phosphate
ttctctgaccgaagctgggtgtc

SEQ ID NO: 204 - RNA, 23 nt, synthetic construct
  source 1..23: mol_type = other RNA
ttttctctgaccgaagctgggtg

SEQ ID NO: 205 - RNA, 23 nt, synthetic construct
  source 1..23: mol_type = other RNA
tcatttctctgaccgaagctggg

SEQ ID NO: 206 - RNA, 23 nt, synthetic construct
  source 1..23: mol_type = other RNA
  modified_base 1: mod_base = OTHER; note = 2'-O-methyluridine-3'-phosphate
  modified_base 2: mod_base = OTHER; note = 2'-O-methylcytidine-3'-phosphate
  modified_base 3: mod_base = OTHER; note = 2'-O-methyluridine-3'-phosphate
  modified_base 4: mod_base = OTHER; note = 2'-O-methylcytidine-3'-phosphate
  modified_base 5: mod_base = OTHER; note = 2'-O-methyladenosine-3'-phosphate
  modified_base 6: mod_base = OTHER; note = 2'-O-methyluridine-3'-phosphate
  modified_base 7: mod_base = OTHER; note = 2'-O-methyluridine-3'-phosphate
  modified_base 8: mod_base = OTHER; note = 2'-O-methyluridine-3'-phosphate
  modified_base 9: mod_base = OTHER; note = 2'-O-methylcytidine-3'-phosphate
  modified_base 10: mod_base = OTHER; note = 2'-O-methyluridine-3'-phosphate
  modified_base 11: mod_base = OTHER; note = 2'-O-methylcytidine-3'-phosphate
  modified_base 12: mod_base = OTHER; note = 2'-O-methyluridine-3'-phosphate
  modified_base 13: mod_base = OTHER; note = 2'-O-methylguanosine-3'-phosphate
  modified_base 14: mod_base = OTHER; note = 2'-O-methyladenosine-3'-phosphate
  modified_base 15: mod_base = OTHER; note = 2'-O-methylcytidine-3'-phosphate
  modified_base 16: mod_base = OTHER; note = 2'-O-methylcytidine-3'-phosphate
  modified_base 17: mod_base = OTHER; note = 2'-O-methylguanosine-3'-phosphate
  modified_base 18: mod_base = OTHER; note = 2'-O-methyladenosine-3'-phosphate
  modified_base 19: mod_base = OTHER; note = 2'-O-methyladenosine-3'-phosphate
  modified_base 20: mod_base = OTHER; note = 2'-O-methylguanosine-3'-phosphate
  modified_base 21: mod_base = OTHER; note = 2'-O-methylcytidine-3'-phosphate
  modified_base 22: mod_base = OTHER; note = 2'-O-methyluridine-3'-phosphate
  modified_base 23: mod_base = OTHER; note = 2'-O-methylguanosine-3'-phosphate
tctcatttctctgaccgaagctg

SEQ ID NO: 207 - RNA, 23 nt, synthetic construct
  source 1..23: mol_type = other RNA
tcctctcatttctctgaccgaag

SEQ ID NO: 208 - RNA, 23 nt, synthetic construct
  source 1..23: mol_type = other RNA
  modified_base 1: mod_base = OTHER; note = 2'-O-methyluridine-3'-phosphate
  modified_base 2: mod_base = OTHER; note = 2'-O-methyluridine-3'-phosphate
  modified_base 3: mod_base = OTHER; note = 2'-O-methylcytidine-3'-phosphate
  modified_base 4: mod_base = OTHER; note = 2'-O-methylcytidine-3'-phosphate
  modified_base 5: mod_base = OTHER; note = 2'-O-methylcytidine-3'-phosphate
  modified_base 6: mod_base = OTHER; note = 2'-O-methyluridine-3'-phosphate
  modified_base 7: mod_base = OTHER; note = 2'-O-methylcytidine-3'-phosphate
  modified_base 8: mod_base = OTHER; note = 2'-O-methyluridine-3'-phosphate
  modified_base 9: mod_base = OTHER; note = 2'-O-methylcytidine-3'-phosphate
  modified_base 10: mod_base = OTHER; note = 2'-O-methyladenosine-3'-phosphate
  modified_base 11: mod_base = OTHER; note = 2'-O-methyluridine-3'-phosphate
  modified_base 12: mod_base = OTHER; note = 2'-O-methyluridine-3'-phosphate
  modified_base 13: mod_base = OTHER; note = 2'-O-methyluridine-3'-phosphate
  modified_base 14: mod_base = OTHER; note = 2'-O-methylcytidine-3'-phosphate
  modified_base 15: mod_base = OTHER; note = 2'-O-methyluridine-3'-phosphate
  modified_base 16: mod_base = OTHER; note = 2'-O-methylcytidine-3'-phosphate
  modified_base 17: mod_base = OTHER; note = 2'-O-methyluridine-3'-phosphate
  modified_base 18: mod_base = OTHER; note = 2'-O-methylguanosine-3'-phosphate
  modified_base 19: mod_base = OTHER; note = 2'-O-methyladenosine-3'-phosphate
  modified_base 20: mod_base = OTHER; note = 2'-O-methylcytidine-3'-phosphate
  modified_base 21: mod_base = OTHER; note = 2'-O-methylcytidine-3'-phosphate
  modified_base 22: mod_base = OTHER; note = 2'-O-methylguanosine-3'-phosphate
  modified_base 23: mod_base = OTHER; note = 2'-O-methyladenosine
ttccctctcatttctctgaccga

SEQ ID NO: 209 - RNA, 23 nt, synthetic construct
  source 1..23: mol_type = other RNA
ttttccctctcatttctctgacc

SEQ ID NO: 210 - RNA, 23 nt, synthetic construct
  source 1..23: mol_type = other RNA
tcgcatttttactttccctctca

SEQ ID NO: 211 - RNA, 23 nt, synthetic construct
  source 1..23: mol_type = other RNA
tacgcatttttactttccctctc

SEQ ID NO: 212 - RNA, 23 nt, synthetic construct
  source 1..23: mol_type = other RNA
tgacgcatttttactttccctct

SEQ ID NO: 213 - RNA, 23 nt, synthetic construct
  source 1..23: mol_type = other RNA
tcgacgcatttttactttccctc

SEQ ID NO: 214 - RNA, 23 nt, synthetic construct
  source 1..23: mol_type = other RNA
ttcgacgcatttttactttccct

SEQ ID NO: 215 - RNA, 23 nt, synthetic construct
  source 1..23: mol_type = other RNA
tctcgacgcatttttactttccc

SEQ ID NO: 216 - RNA, 23 nt, synthetic construct
  source 1..23: mol_type = other RNA
tgctcgacgcatttttactttcc

SEQ ID NO: 217 - RNA, 23 nt, synthetic construct
  source 1..23: mol_type = other RNA
tagctcgacgcatttttactttc

SEQ ID NO: 218 - RNA, 23 nt, synthetic construct
  source 1..23: mol_type = other RNA
tgagctcgacgcatttttacttt

SEQ ID NO: 219 - RNA, 23 nt, synthetic construct
  source 1..23: mol_type = other RNA
tgctctggaactcaggagtcgcg

SEQ ID NO: 220 - RNA, 23 nt, synthetic construct
  source 1..23: mol_type = other RNA
  modified_base 7: mod_base = OTHER; note = 5'-methyluridine-3'-phosphate
tagctctggaactcaggagtcgc

SEQ ID NO: 221 - RNA, 23 nt, synthetic construct
  source 1..23: mol_type = other RNA
taagctctggaactcaggagtcg

SEQ ID NO: 222 - RNA, 23 nt, synthetic construct
  source 1..23: mol_type = other RNA
  modified_base 7: mod_base = OTHER; note = 5'-methyluridine-3'-phosphate
tcaagctctggaactcaggagtc

SEQ ID NO: 223 - RNA, 23 nt, synthetic construct
  source 1..23: mol_type = other RNA
tgcaagctctggaactcaggagt

SEQ ID NO: 224 - RNA, 23 nt, synthetic construct
  source 1..23: mol_type = other RNA
tagcaagctctggaactcaggag

SEQ ID NO: 225 - RNA, 23 nt, synthetic construct
  source 1..23: mol_type = other RNA
ttgtagcaagctctggaactcag

SEQ ID NO: 226 - RNA, 23 nt, synthetic construct
  source 1..23: mol_type = other RNA
tctgtagcaagctctggaactca

SEQ ID NO: 227 - RNA, 23 nt, synthetic construct
  source 1..23: mol_type = other RNA
tcctgtagcaagctctggaactc

SEQ ID NO: 228 - RNA, 23 nt, synthetic construct
  source 1..23: mol_type = other RNA
  modified_base 7: mod_base = OTHER; note = 5'-methyluridine-3'-phosphate
tgcctgtagcaagctctggaact

SEQ ID NO: 229 - RNA, 23 nt, synthetic construct
  source 1..23: mol_type = other RNA
tagcctgtagcaagctctggaac

SEQ ID NO: 230 - RNA, 23 nt, synthetic construct
  source 1..23: mol_type = other RNA
  modified_base 7: mod_base = OTHER; note = 5'-methyluridine-3'-phosphate
tcagcctgtagcaagctctggaa

SEQ ID NO: 231 - RNA, 23 nt, synthetic construct
  source 1..23: mol_type = other RNA
tgcagcctgtagcaagctctgga

SEQ ID NO: 232 - RNA, 23 nt, synthetic construct
  source 1..23: mol_type = other RNA
tggaaacaaccgcagcctgtagc

SEQ ID NO: 233 - RNA, 23 nt, synthetic construct
  source 1..23: mol_type = other RNA
taggagggaaacaaccgcagcct

SEQ ID NO: 234 - RNA, 23 nt, synthetic construct
  source 1..23: mol_type = other RNA
taaggagggaaacaaccgcagcc

SEQ ID NO: 235 - RNA, 23 nt, synthetic construct
  source 1..23: mol_type = other RNA
tacaaggagggaaacaaccgcag

SEQ ID NO: 236 - RNA, 23 nt, synthetic construct
  source 1..23: mol_type = other RNA
taacaaggagggaaacaaccgca

SEQ ID NO: 237 - RNA, 23 nt, synthetic construct
  source 1..23: mol_type = other RNA
taaaacaaggagggaaacaaccg

SEQ ID NO: 238 - RNA, 23 nt, synthetic construct
  source 1..23: mol_type = other RNA
tgaaaacaaggagggaaacaacc

SEQ ID NO: 239 - RNA, 23 nt, synthetic construct
  source 1..23: mol_type = other RNA
tagaagaaaacaaggagggaaac

SEQ ID NO: 240 - RNA, 23 nt, synthetic construct
  source 1..23: mol_type = other RNA
tcagaagaaaacaaggagggaaa

SEQ ID NO: 241 - RNA, 23 nt, synthetic construct
  source 1..23: mol_type = other RNA
tccagaagaaaacaaggagggaa

SEQ ID NO: 242 - RNA, 23 nt, synthetic construct
  source 1..23: mol_type = other RNA
taccagaagaaaacaaggaggga

SEQ ID NO: 243 - RNA, 23 nt, synthetic construct
  source 1..23: mol_type = other RNA
taaccagaagaaaacaaggaggg

SEQ ID NO: 244 - RNA, 23 nt, synthetic construct
  source 1..23: mol_type = other RNA
tttaaccagaagaaaacaaggag

SEQ ID NO: 245 - RNA, 23 nt, synthetic construct
  source 1..23: mol_type = other RNA
tattaaccagaagaaaacaagga

SEQ ID NO: 246 - RNA, 23 nt, synthetic construct
  source 1..23: mol_type = other RNA
tgattaaccagaagaaaacaagg

SEQ ID NO: 247 - RNA, 23 nt, synthetic construct
  source 1..23: mol_type = other RNA
tagattaaccagaagaaaacaag

SEQ ID NO: 248 - RNA, 23 nt, synthetic construct
  source 1..23: mol_type = other RNA
taagattaaccagaagaaaacaa

SEQ ID NO: 249 - RNA, 23 nt, synthetic construct
  source 1..23: mol_type = other RNA
tataaagattaaccagaagaaaa

SEQ ID NO: 250 - RNA, 23 nt, synthetic construct
  source 1..23: mol_type = other RNA
tgataaagattaaccagaagaaa

SEQ ID NO: 251 - RNA, 23 nt, synthetic construct
  source 1..23: mol_type = other RNA
ttgataaagattaaccagaagaa

SEQ ID NO: 252 - RNA, 23 nt, synthetic construct
  source 1..23: mol_type = other RNA
tctgataaagattaaccagaaga

SEQ ID NO: 253 - RNA, 23 nt, synthetic construct
  source 1..23: mol_type = other RNA
tcctgataaagattaaccagaag

SEQ ID NO: 254 - RNA, 23 nt, synthetic construct
  source 1..23: mol_type = other RNA
tacctgataaagattaaccagaa

SEQ ID NO: 255 - RNA, 23 nt, synthetic construct
  source 1..23: mol_type = other RNA
tgacctgataaagattaaccaga

SEQ ID NO: 256 - RNA, 23 nt, synthetic construct
  source 1..23: mol_type = other RNA
taagacctgataaagattaacca

SEQ ID NO: 257 - RNA, 23 nt, synthetic construct
  source 1..23: mol_type = other RNA
taaagacctgataaagattaacc

SEQ ID NO: 258 - RNA, 23 nt, synthetic construct
  source 1..23: mol_type = other RNA
tgaaaagacctgataaagattaa

SEQ ID NO: 259 - RNA, 23 nt, synthetic construct
  source 1..23: mol_type = other RNA
tagaaaagacctgataaagatta

SEQ ID NO: 260 - RNA, 23 nt, synthetic construct
  source 1..23: mol_type = other RNA
taagaaaagacctgataaagatt

SEQ ID NO: 261 - RNA, 23 nt, synthetic construct
  source 1..23: mol_type = other RNA
tcaagaaaagacctgataaagat

SEQ ID NO: 262 - RNA, 23 nt, synthetic construct
  source 1..23: mol_type = other RNA
tacaagaaaagacctgataaaga

SEQ ID NO: 263 - RNA, 23 nt, synthetic construct
  source 1..23: mol_type = other RNA
  modified_base 1: mod_base = OTHER; note = 2'-O-methyluridine-3'-phosphate
  modified_base 2: mod_base = OTHER; note = 2'-O-methyladenosine-3'-phosphate
  modified_base 3: mod_base = OTHER; note = 2'-O-methyladenosine-3'-phosphate
  modified_base 4: mod_base = OTHER; note = 2'-O-methylcytidine-3'-phosphate
  modified_base 5: mod_base = OTHER; note = 2'-O-methyladenosine-3'-phosphate
  modified_base 6: mod_base = OTHER; note = 2'-O-methyladenosine-3'-phosphate
  modified_base 7: mod_base = OTHER; note = 2'-O-methylguanosine-3'-phosphate
  modified_base 8: mod_base = OTHER; note = 2'-O-methyladenosine-3'-phosphate
  modified_base 9: mod_base = OTHER; note = 2'-O-methyladenosine-3'-phosphate
  modified_base 10: mod_base = OTHER; note = 2'-O-methyladenosine-3'-phosphate
  modified_base 11: mod_base = OTHER; note = 2'-O-methyladenosine-3'-phosphate
  modified_base 12: mod_base = OTHER; note = 2'-O-methylguanosine-3'-phosphate
  modified_base 13: mod_base = OTHER; note = 2'-O-methyladenosine-3'-phosphate
  modified_base 14: mod_base = OTHER; note = 2'-O-methylcytidine-3'-phosphate
  modified_base 15: mod_base = OTHER; note = 2'-O-methylcytidine-3'-phosphate
  modified_base 16: mod_base = OTHER; note = 2'-O-methyluridine-3'-phosphate
  modified_base 17: mod_base = OTHER; note = 2'-O-methylguanosine-3'-phosphate
  modified_base 18: mod_base = OTHER; note = 2'-O-methyladenosine-3'-phosphate
  modified_base 19: mod_base = OTHER; note = 2'-O-methyluridine-3'-phosphate
  modified_base 20: mod_base = OTHER; note = 2'-O-methyladenosine-3'-phosphate
  modified_base 21: mod_base = OTHER; note = 2'-O-methyladenosine-3'-phosphate
  modified_base 22: mod_base = OTHER; note = 2'-O-methyladenosine-3'-phosphate
  modified_base 23: mod_base = OTHER; note = 2'-O-methylguanosine-3'-phosphate
taacaagaaaagacctgataaag

SEQ ID NO: 264 - RNA, 23 nt, synthetic construct
  source 1..23: mol_type = other RNA
  modified_base 1: mod_base = OTHER; note = 2'-O-methyluridine-3'-phosphate
  modified_base 2: mod_base = OTHER; note = 2'-O-methylguanosine-3'-phosphate
  modified_base 3: mod_base = OTHER; note = 2'-O-methyladenosine-3'-phosphate
  modified_base 4: mod_base = OTHER; note = 2'-O-methyladenosine-3'-phosphate
  modified_base 5: mod_base = OTHER; note = 2'-O-methylcytidine-3'-phosphate
  modified_base 6: mod_base = OTHER; note = 2'-O-methyladenosine-3'-phosphate
  modified_base 7: mod_base = OTHER; note = 2'-O-methyladenosine-3'-phosphate
  modified_base 8: mod_base = OTHER; note = 2'-O-methylguanosine-3'-phosphate
  modified_base 9: mod_base = OTHER; note = 2'-O-methyladenosine-3'-phosphate
  modified_base 10: mod_base = OTHER; note = 2'-O-methyladenosine-3'-phosphate
  modified_base 12: mod_base = OTHER; note = 2'-O-methyladenosine-3'-phosphate
  modified_base 13: mod_base = OTHER; note = 2'-O-methyladenosine-3'-phosphate
  modified_base 14: mod_base = OTHER; note = 2'-O-methylguanosine-3'-phosphate
  modified_base 15: mod_base = OTHER; note = 2'-O-methyladenosine-3'-phosphate
  modified_base 16: mod_base = OTHER; note = 2'-O-methylcytidine-3'-phosphate
  modified_base 17: mod_base = OTHER; note = 2'-O-methylcytidine-3'-phosphate
  modified_base 18: mod_base = OTHER; note = 2'-O-methyluridine-3'-phosphate
  modified_base 19: mod_base = OTHER; note = 2'-O-methylguanosine-3'-phosphate
  modified_base 20: mod_base = OTHER; note = 2'-O-methyladenosine-3'-phosphate
  modified_base 21: mod_base = OTHER; note = 2'-O-methyluridine-3'-phosphate
  modified_base 23: mod_base = OTHER; note = 2'-O-methyladenosine-3'-phosphate
tgaacaagaaaagacctgataaa

SEQ ID NO: 265 - RNA, 23 nt, synthetic construct
  source 1..23: mol_type = other RNA
ttgaacaagaaaagacctgataa

SEQ ID NO: 266 - RNA, 23 nt, synthetic construct
  source 1..23: mol_type = other RNA
tgtgaacaagaaaagacctgata

SEQ ID NO: 267 - RNA, 23 nt, synthetic construct
  source 1..23: mol_type = other RNA
tggtgaacaagaaaagacctgat

SEQ ID NO: 268 - RNA, 23 nt, synthetic construct
  source 1..23: mol_type = other RNA
tagggtgaacaagaaaagacctg

SEQ ID NO: 269 - RNA, 23 nt, synthetic construct
  source 1..23: mol_type = other RNA
ttgagggtgaacaagaaaagacc

SEQ ID NO: 270 - RNA, 23 nt, synthetic construct
  source 1..23: mol_type = other RNA
tctgagggtgaacaagaaaagac

SEQ ID NO: 271 - RNA, 23 nt, synthetic construct
  source 1..23: mol_type = other RNA
tgctgagggtgaacaagaaaaga

SEQ ID NO: 272 - RNA, 23 nt, synthetic construct
  source 1..23: mol_type = other RNA
ttcgctgagggtgaacaagaaaa

SEQ ID NO: 273 - RNA, 23 nt, synthetic construct
  source 1..23: mol_type = other RNA
ttctcacagtactcgctgagggt

SEQ ID NO: 274 - RNA, 23 nt, synthetic construct
  source 1..23: mol_type = other RNA
tgctctcacagtactcgctgagg

SEQ ID NO: 275 - RNA, 23 nt, synthetic construct
  source 1..23: mol_type = other RNA
  modified_base 7: mod_base = OTHER; note = 5'-methyluridine-3'-phosphate
ttgctctcacagtactcgctgag

SEQ ID NO: 276 - RNA, 23 nt, synthetic construct
  source 1..23: mol_type = other RNA
tttgctctcacagtactcgctga

SEQ ID NO: 277 - RNA, 23 nt, synthetic construct
  source 1..23: mol_type = other RNA
  modified_base 7: mod_base = OTHER; note = 5'-methyluridine-3'-phosphate
tcttgctctcacagtactcgctg

SEQ ID NO: 278 - RNA, 23 nt, synthetic construct
  source 1..23: mol_type = other RNA
tacttgctctcacagtactcgct

SEQ ID NO: 279 - RNA, 23 nt, synthetic construct
  source 1..23: mol_type = other RNA
ttacttgctctcacagtactcgc

SEQ ID NO: 280 - RNA, 23 nt, synthetic construct
  source 1..23: mol_type = other RNA
tctacttgctctcacagtactcg

SEQ ID NO: 281 - RNA, 23 nt, synthetic construct
  source 1..23: mol_type = other RNA
tcactacttgctctcacagtact

SEQ ID NO: 282 - RNA, 23 nt, synthetic construct
  source 1..23: mol_type = other RNA
tgaggtgtgtgtttttgtttttc

SEQ ID NO: 283 - RNA, 23 nt, synthetic construct
  source 1..23: mol_type = other RNA
tggtgtgggtttaggaggtgtgt

SEQ ID NO: 284 - RNA, 23 nt, synthetic construct
  source 1..23: mol_type = other RNA
tcaggtgtgggtttaggaggtgt

SEQ ID NO: 285 - RNA, 23 nt, synthetic construct
  source 1..23: mol_type = other RNA
tagcaggtgtgggtttaggaggt

SEQ ID NO: 286 - RNA, 23 nt, synthetic construct
  source 1..23: mol_type = other RNA
ttctagcaagagcaggtgtgggt

SEQ ID NO: 287 - RNA, 23 nt, synthetic construct
  source 1..23: mol_type = other RNA
tgtctagcaagagcaggtgtggg

SEQ ID NO: 288 - RNA, 23 nt, synthetic construct
  source 1..23: mol_type = other RNA
tggtctagcaagagcaggtgtgg

SEQ ID NO: 289 - RNA, 21 nt, synthetic construct
  source 1..21: mol_type = other RNA
  modified_base 1: mod_base = OTHER; note = 2'-O-methylcytidine-3'-phosphorothioate
  modified_base 2: mod_base = OTHER; note = 2'-O-methylcytidine-3'-phosphorothioate
  modified_base 3: mod_base = OTHER; note = 2'-O-methylguanosine-3'-phosphate
  modified_base 4: mod_base = OTHER; note = 2'-O-methyladenosine-3'-phosphate
  modified_base 5: mod_base = OTHER; note = 2'-O-methylguanosine-3'-phosphate
  modified_base 6: mod_base = OTHER; note = 2'-O-hexadecyl-guanosine-3'-phosphate
  modified_base 7: mod_base = OTHER; note = 2'-deoxy-2'-fluorocytidine-3'-phosphate
  modified_base 8: mod_base = OTHER; note = 2'-O-methyluridine-3'-phosphate
  modified_base 9: mod_base = OTHER; note = 2'-deoxy-2'-fluorocytidine-3'-phosphate
  modified_base 10: mod_base = OTHER; note = 2'-deoxy-2'-fluorocytidine-3'-phosphate
  modified_base 11: mod_base = OTHER; note = 2'-deoxy-2'-fluorocytidine-3'-phosphate
  modified_base 12: mod_base = OTHER; note = 2'-O-methyluridine-3'-phosphate
  modified_base 13: mod_base = OTHER; note = 2'-O-methyluridine-3'-phosphate
  modified_base 14: mod_base = OTHER; note = 2'-O-methyluridine-3'-phosphate
  modified_base 15: mod_base = OTHER; note = 2'-O-methyluridine-3'-phosphate
  modified_base 16: mod_base = OTHER; note = 2'-O-methylcytidine-3'-phosphate
  modified_base 17: mod_base = OTHER; note = 2'-O-methyluridine-3'-phosphate
  modified_base 18: mod_base = OTHER; note = 2'-O-methylcytidine-3'-phosphate
  modified_base 19: mod_base = OTHER; note = 2'-O-methylguanosine-3'-phosphorothioate
  modified_base 20: mod_base = OTHER; note = 2'-O-methyladenosine-3'-phosphorothioate
  modified_base 21: mod_base = OTHER; note = 2'-O-methyladenosine
ccgaggctcccttttctcgaa

SEQ ID NO: 290 - RNA, 21 nt, synthetic construct
  source 1..21: mol_type = other RNA
  modified_base 1: mod_base = OTHER; note = 2'-O-methyladenosine-3'-phosphorothioate
  modified_base 2: mod_base = OTHER; note = 2'-O-methylguanosine-3'-phosphorothioate
  modified_base 3: mod_base = OTHER; note = 2'-O-methylguanosine-3'-phosphate
  modified_base 4: mod_base = OTHER; note = 2'-O-methylcytidine-3'-phosphate
  modified_base 5: mod_base = OTHER; note = 2'-O-methyladenosine-3'-phosphate
  modified_base 6: mod_base = OTHER; note = 2'-O-hexadecyl-adenosine-3'-phosphate
  modified_base 7: mod_base = OTHER; note = 2'-deoxy-2'-fluorouridine-3'-phosphate
  modified_base 8: mod_base = OTHER; note = 2'-O-methyluridine-3'-phosphate
  modified_base 9: mod_base = OTHER; note = 2'-deoxy-2'-fluorocytidine-3'-phosphate
  modified_base 10: mod_base = OTHER; note = 2'-deoxy-2'-fluorocytidine-3'-phosphate
  modified_base 11: mod_base = OTHER; note = 2'-deoxy-2'-fluoroadenosine-3'-phosphate
  modified_base 12: mod_base = OTHER; note = 2'-O-methylcytidine-3'-phosphate
  modified_base 13: mod_base = OTHER; note = 2'-O-methylcytidine-3'-phosphate
  modified_base 14: mod_base = OTHER; note = 2'-O-methyladenosine-3'-phosphate
  modified_base 15: mod_base = OTHER; note = 2'-O-methylguanosine-3'-phosphate
  modified_base 16: mod_base = OTHER; note = 2'-O-methyluridine-3'-phosphate
  modified_base 17: mod_base = OTHER; note = 2'-O-methylcytidine-3'-phosphate
  modified_base 18: mod_base = OTHER; note = 2'-O-methylguanosine-3'-phosphate
  modified_base 19: mod_base = OTHER; note = 2'-O-methylcytidine-3'-phosphorothioate
  modified_base 20: mod_base = OTHER; note = 2'-O-methyluridine-3'-phosphorothioate
  modified_base 21: mod_base = OTHER; note = 2'-O-methyladenosine
aggcaattccaccagtcgcta

SEQ ID NO: 291 - RNA, 21 nt, synthetic construct
  source 1..21: mol_type = other RNA
  modified_base 1: mod_base = OTHER; note = 2'-O-methylcytidine-3'-phosphorothioate
  modified_base 2: mod_base = OTHER; note = 2'-O-methyladenosine-3'-phosphorothioate
  modified_base 3: mod_base = OTHER; note = 2'-O-methylcytidine-3'-phosphate
  modified_base 4: mod_base = OTHER; note = 2'-O-methylcytidine-3'-phosphate
  modified_base 5: mod_base = OTHER; note = 2'-O-methyladenosine-3'-phosphate
  modified_base 6: mod_base = OTHER; note = 2'-O-hexadecyl-guanosine-3'-phosphate
  modified_base 7: mod_base = OTHER; note = 2'-deoxy-2'-fluorouridine-3'-phosphate
  modified_base 8: mod_base = OTHER; note = 2'-O-methylcytidine-3'-phosphate
  modified_base 9: mod_base = OTHER; note = 2'-deoxy-2'-fluoroguanosine-3'-phosphate
  modified_base 10: mod_base = OTHER; note = 2'-deoxy-2'-fluorocytidine-3'-phosphate
  modified_base 11: mod_base = OTHER; note = 2'-deoxy-2'-fluorouridine-3'-phosphate
  modified_base 12: mod_base = OTHER; note = 2'-O-methyladenosine-3'-phosphate
  modified_base 13: mod_base = OTHER; note = 2'-O-methylguanosine-3'-phosphate
  modified_base 14: mod_base = OTHER; note = 2'-O-methyladenosine-3'-phosphate
  modified_base 15: mod_base = OTHER; note = 2'-O-methylguanosine-3'-phosphate
  modified_base 16: mod_base = OTHER; note = 2'-O-methylguanosine-3'-phosphate
  modified_base 17: mod_base = OTHER; note = 2'-O-methylcytidine-3'-phosphate
  modified_base 18: mod_base = OTHER; note = 2'-O-methylguanosine-3'-phosphate
  modified_base 19: mod_base = OTHER; note = 2'-O-methyladenosine-3'-phosphorothioate
  modified_base 20: mod_base = OTHER; note = 2'-O-methyladenosine-3'-phosphorothioate
  modified_base 21: mod_base = OTHER; note = 2'-O-methyladenosine
caccagtcgctagaggcgaaa

SEQ ID NO: 292 - RNA, 21 nt, synthetic construct
  source 1..21: mol_type = other RNA
  modified_base 1: mod_base = OTHER; note = 2'-O-methyladenosine-3'-phosphorothioate
  modified_base 2: mod_base = OTHER; note = 2'-O-methylcytidine-3'-phosphorothioate
  modified_base 3: mod_base = OTHER; note = 2'-O-methylcytidine-3'-phosphate
  modified_base 4: mod_base = OTHER; note = 2'-O-methyladenosine-3'-phosphate
  modified_base 5: mod_base = OTHER; note = 2'-O-methylguanosine-3'-phosphate
  modified_base 6: mod_base = OTHER; note = 2'-O-hexadecyl-uridine-3'-phosphate
  modified_base 7: mod_base = OTHER; note = 2'-deoxy-2'-fluorocytidine-3'-phosphate
  modified_base 8: mod_base = OTHER; note = 2'-O-methylguanosine-3'-phosphate
  modified_base 9: mod_base = OTHER; note = 2'-deoxy-2'-fluorocytidine-3'-phosphate
  modified_base 10: mod_base = OTHER; note = 2'-deoxy-2'-fluorouridine-3'-phosphate
  modified_base 11: mod_base = OTHER; note = 2'-deoxy-2'-fluoroadenosine-3'-phosphate
  modified_base 12: mod_base = OTHER; note = 2'-O-methylguanosine-3'-phosphate
  modified_base 13: mod_base = OTHER; note = 2'-O-methyladenosine-3'-phosphate
  modified_base 14: mod_base = OTHER; note = 2'-O-methylguanosine-3'-phosphate
  modified_base 15: mod_base = OTHER; note = 2'-O-methylguanosine-3'-phosphate
  modified_base 16: mod_base = OTHER; note = 2'-O-methylcytidine-3'-phosphate
  modified_base 17: mod_base = OTHER; note = 2'-O-methylguanosine-3'-phosphate
  modified_base 18: mod_base = OTHER; note = 2'-O-methyladenosine-3'-phosphate
  modified_base 19: mod_base = OTHER; note = 2'-O-methyladenosine-3'-phosphorothioate
  modified_base 20: mod_base = OTHER; note = 2'-O-methyladenosine-3'-phosphorothioate
  modified_base 21: mod_base = OTHER; note = 2'-O-methyladenosine
accagtcgctagaggcgaaaa

SEQ ID NO: 293 - RNA, 21 nt, synthetic construct
  source 1..21: mol_type = other RNA
  modified_base 1: mod_base = OTHER; note = 2'-O-methylcytidine-3'-phosphorothioate
  modified_base 2: mod_base = OTHER; note = 2'-O-methyladenosine-3'-phosphorothioate
  modified_base 3: mod_base = OTHER; note = 2'-O-methylcytidine-3'-phosphate
  modified_base 4: mod_base = OTHER; note = 2'-O-methylcytidine-3'-phosphate
  modified_base 5: mod_base = OTHER; note = 2'-O-methylcytidine-3'-phosphate
  modified_base 6: mod_base = OTHER; note = 2'-O-hexadecyl-adenosine-3'-phosphate
  modified_base 7: mod_base = OTHER; note = 2'-deoxy-2'-fluoroguanosine-3'-phosphate
  modified_base 8: mod_base = OTHER; note = 2'-O-methylcytidine-3'-phosphate
  modified_base 9: mod_base = OTHER; note = 2'-deoxy-2'-fluorouridine-3'-phosphate
  modified_base 10: mod_base = OTHER; note = 2'-deoxy-2'-fluorouridine-3'-phosphate
  modified_base 11: mod_base = OTHER; note = 2'-deoxy-2'-fluorocytidine-3'-phosphate
  modified_base 12: mod_base = OTHER; note = 2'-O-methylguanosine-3'-phosphate
  modified_base 13: mod_base = OTHER; note = 2'-O-methylguanosine-3'-phosphate
  modified_base 14: mod_base = OTHER; note = 2'-O-methyluridine-3'-phosphate
  modified_base 15: mod_base = OTHER; note = 2'-O-methylcytidine-3'-phosphate
  modified_base 16: mod_base = OTHER; note = 2'-O-methyladenosine-3'-phosphate
  modified_base 17: mod_base = OTHER; note = 2'-O-methylguanosine-3'-phosphate
  modified_base 18: mod_base = OTHER; note = 2'-O-methyladenosine-3'-phosphate
  modified_base 19: mod_base = OTHER; note = 2'-O-methylguanosine-3'-phosphorothioate
  modified_base 20: mod_base = OTHER; note = 2'-O-methyladenosine-3'-phosphorothioate
  modified_base 21: mod_base = OTHER; note = 2'-O-methyladenosine
cacccagcttcggtcagagaa

SEQ ID NO: 294 - RNA, 21 nt, synthetic construct
  source 1..21: mol_type = other RNA
  modified_base 1: mod_base = OTHER; note = 2'-O-methylcytidine-3'-phosphorothioate
  modified_base 2: mod_base = OTHER; note = 2'-O-methylcytidine-3'-phosphorothioate
  modified_base 3: mod_base = OTHER; note = 2'-O-methylcytidine-3'-phosphate
  modified_base 4: mod_base = OTHER; note = 2'-O-methyladenosine-3'-phosphate
  modified_base 5: mod_base = OTHER; note = 2'-O-methylguanosine-3'-phosphate
  modified_base 6: mod_base = OTHER; note = 2'-O-hexadecyl-cytidine-3'-phosphate
  modified_base 7: mod_base = OTHER; note = 2'-deoxy-2'-fluorouridine-3'-phosphate
  modified_base 8: mod_base = OTHER; note = 2'-O-methyluridine-3'-phosphate
  modified_base 9: mod_base = OTHER; note = 2'-deoxy-2'-fluorocytidine-3'-phosphate
  modified_base 10: mod_base = OTHER; note = 2'-deoxy-2'-fluoroguanosine-3'-phosphate
  modified_base 11: mod_base = OTHER; note = 2'-deoxy-2'-fluoroguanosine-3'-phosphate
  modified_base 12: mod_base = OTHER; note = 2'-O-methyluridine-3'-phosphate
  modified_base 13: mod_base = OTHER; note = 2'-O-methylcytidine-3'-phosphate
  modified_base 14: mod_base = OTHER; note = 2'-O-methyladenosine-3'-phosphate
  modified_base 15: mod_base = OTHER; note = 2'-O-methylguanosine-3'-phosphate
  modified_base 16: mod_base = OTHER; note = 2'-O-methyladenosine-3'-phosphate
  modified_base 17: mod_base = OTHER; note = 2'-O-methylguanosine-3'-phosphate
  modified_base 18: mod_base = OTHER; note = 2'-O-methyladenosine-3'-phosphate
  modified_base 19: mod_base = OTHER; note = 2'-O-methyladenosine-3'-phosphorothioate
  modified_base 20: mod_base = OTHER; note = 2'-O-methyladenosine-3'-phosphorothioate
  modified_base 21: mod_base = OTHER; note = 2'-O-methyladenosine
cccagcttcggtcagagaaaa

SEQ ID NO: 295 - RNA, 21 nt, synthetic construct
  source 1..21: mol_type = other RNA
  modified_base 1: mod_base = OTHER; note = 2'-O-methylcytidine-3'-phosphorothioate
  modified_base 2: mod_base = OTHER; note = 2'-O-methyladenosine-3'-phosphorothioate
  modified_base 3: mod_base = OTHER; note = 2'-O-methylguanosine-3'-phosphate
  modified_base 4: mod_base = OTHER; note = 2'-O-methylcytidine-3'-phosphate
  modified_base 5: mod_base = OTHER; note = 2'-O-methyluridine-3'-phosphate
  modified_base 6: mod_base = OTHER; note = 2'-O-hexadecyl-uridine-3'-phosphate
  modified_base 7: mod_base = OTHER; note = 2'-deoxy-2'-fluorocytidine-3'-phosphate
  modified_base 8: mod_base = OTHER; note = 2'-O-methylguanosine-3'-phosphate
  modified_base 9: mod_base = OTHER; note = 2'-deoxy-2'-fluoroguanosine-3'-phosphate
  modified_base 10: mod_base = OTHER; note = 2'-deoxy-2'-fluorouridine-3'-phosphate
  modified_base 11: mod_base = OTHER; note = 2'-deoxy-2'-fluorocytidine-3'-phosphate
  modified_base 12: mod_base = OTHER; note = 2'-O-methyladenosine-3'-phosphate
  modified_base 13: mod_base = OTHER; note = 2'-O-methylguanosine-3'-phosphate
  modified_base 14: mod_base = OTHER; note = 2'-O-methyladenosine-3'-phosphate
  modified_base 15: mod_base = OTHER; note = 2'-O-methylguanosine-3'-phosphate
  modified_base 16: mod_base = OTHER; note = 2'-O-methyladenosine-3'-phosphate
  modified_base 17: mod_base = OTHER; note = 2'-O-methyladenosine-3'-phosphate
  modified_base 18: mod_base = OTHER; note = 2'-O-methyladenosine-3'-phosphate
  modified_base 19: mod_base = OTHER; note = 2'-O-methyluridine-3'-phosphorothioate
  modified_base 20: mod_base = OTHER; note = 2'-O-methylguanosine-3'-phosphorothioate
  modified_base 21: mod_base = OTHER; note = 2'-O-methyladenosine
cagcttcggtcagagaaatga

SEQ ID NO: 296 - RNA, 21 nt, synthetic construct
  source 1..21: mol_type = other RNA
  modified_base 1: mod_base = OTHER; note = 2'-O-methylguanosine-3'-phosphorothioate
  modified_base 2: mod_base = OTHER; note = 2'-O-methylcytidine-3'-phosphorothioate
  modified_base 3: mod_base = OTHER; note = 2'-O-methyluridine-3'-phosphate
  modified_base 4: mod_base = OTHER; note = 2'-O-methyluridine-3'-phosphate
  modified_base 5: mod_base = OTHER; note = 2'-O-methylcytidine-3'-phosphate
  modified_base 6: mod_base = OTHER; note = 2'-O-hexadecyl-guanosine-3'-phosphate
  modified_base 7: mod_base = OTHER; note = 2'-deoxy-2'-fluoroguanosine-3'-phosphate
  modified_base 8: mod_base = OTHER; note = 2'-O-methyluridine-3'-phosphate
  modified_base 9: mod_base = OTHER; note = 2'-deoxy-2'-fluorocytidine-3'-phosphate
  modified_base 10: mod_base = OTHER; note = 2'-deoxy-2'-fluoroadenosine-3'-phosphate
  modified_base 11: mod_base = OTHER; note = 2'-deoxy-2'-fluoroguanosine-3'-phosphate
  modified_base 12: mod_base = OTHER; note = 2'-O-methyladenosine-3'-phosphate
  modified_base 13: mod_base = OTHER; note = 2'-O-methylguanosine-3'-phosphate
  modified_base 14: mod_base = OTHER; note = 2'-O-methyladenosine-3'-phosphate
  modified_base 15: mod_base = OTHER; note = 2'-O-methyladenosine-3'-phosphate
  modified_base 16: mod_base = OTHER; note = 2'-O-methyladenosine-3'-phosphate
  modified_base 17: mod_base = OTHER; note = 2'-O-methyluridine-3'-phosphate
  modified_base 18: mod_base = OTHER; note = 2'-O-methylguanosine-3'-phosphate
  modified_base 19: mod_base = OTHER; note = 2'-O-methyladenosine-3'-phosphorothioate
  modified_base 20: mod_base = OTHER; note = 2'-O-methylguanosine-3'-phosphorothioate
  modified_base 21: mod_base = OTHER; note = 2'-O-methyladenosine
gcttcggtcagagaaatgaga

SEQ ID NO: 297 - RNA, 21 nt, synthetic construct
  source 1..21: mol_type = other RNA
  modified_base 1: mod_base = OTHER; note = 2'-O-methyluridine-3'-phosphorothioate
  modified_base 2: mod_base = OTHER; note = 2'-O-methylcytidine-3'-phosphorothioate
  modified_base 3: mod_base = OTHER; note = 2'-O-methylguanosine-3'-phosphate
  modified_base 4: mod_base = OTHER; note = 2'-O-methylguanosine-3'-phosphate
  modified_base 5: mod_base = OTHER; note = 2'-O-methyluridine-3'-phosphate
  modified_base 6: mod_base = OTHER; note = 2'-O-hexadecyl-cytidine-3'-phosphate
  modified_base 7: mod_base = OTHER; note = 2'-deoxy-2'-fluoroadenosine-3'-phosphate
  modified_base 8: mod_base = OTHER; note = 2'-O-methylguanosine-3'-phosphate
  modified_base 9: mod_base = OTHER; note = 2'-deoxy-2'-fluoroadenosine-3'-phosphate
  modified_base 10: mod_base = OTHER; note = 2'-deoxy-2'-fluoroguanosine-3'-phosphate
  modified_base 11: mod_base = OTHER; note = 2'-deoxy-2'-fluoroadenosine-3'-phosphate
  modified_base 12: mod_base = OTHER; note = 2'-O-methyladenosine-3'-phosphate
  modified_base 13: mod_base = OTHER; note = 2'-O-methyladenosine-3'-phosphate
  modified_base 14: mod_base = OTHER; note = 2'-O-methyluridine-3'-phosphate
  modified_base 15: mod_base = OTHER; note = 2'-O-methylguanosine-3'-phosphate
  modified_base 16: mod_base = OTHER; note = 2'-O-methyladenosine-3'-phosphate
  modified_base 17: mod_base = OTHER; note = 2'-O-methylguanosine-3'-phosphate
  modified_base 18: mod_base = OTHER; note = 2'-O-methyladenosine-3'-phosphate
  modified_base 19: mod_base = OTHER; note = 2'-O-methylguanosine-3'-phosphorothioate
  modified_base 20: mod_base = OTHER; note = 2'-O-methylguanosine-3'-phosphorothioate
  modified_base 21: mod_base = OTHER; note = 2'-O-methyladenosine
tcggtcagagaaatgagagga

SEQ ID NO: 298 - RNA, 21 nt, synthetic construct
  source 1..21: mol_type = other RNA
  modified_base 1: mod_base = OTHER; note = 2'-O-methylguanosine-3'-phosphorothioate
  modified_base 2: mod_base = OTHER; note = 2'-O-methylguanosine-3'-phosphorothioate
  modified_base 3: mod_base = OTHER; note = 2'-O-methyluridine-3'-phosphate
  modified_base 4: mod_base = OTHER; note = 2'-O-methylcytidine-3'-phosphate
  modified_base 5: mod_base = OTHER; note = 2'-O-methyladenosine-3'-phosphate
  modified_base 6: mod_base = OTHER; note = 2'-O-hexadecyl-guanosine-3'-phosphate
  modified_base 7: mod_base = OTHER; note = 2'-deoxy-2'-fluoroadenosine-3'-phosphate
  modified_base 8: mod_base = OTHER; note = 2'-O-methylguanosine-3'-phosphate
  modified_base 9: mod_base = OTHER; note = 2'-deoxy-2'-fluoroadenosine-3'-phosphate
  modified_base 10: mod_base = OTHER; note = 2'-deoxy-2'-fluoroadenosine-3'-phosphate
  modified_base 11: mod_base = OTHER; note = 2'-deoxy-2'-fluoroadenosine-3'-phosphate
  modified_base 12: mod_base = OTHER; note = 2'-O-methyluridine-3'-phosphate
  modified_base 13: mod_base = OTHER; note = 2'-O-methylguanosine-3'-phosphate
  modified_base 14: mod_base = OTHER; note = 2'-O-methyladenosine-3'-phosphate
  modified_base 15: mod_base = OTHER; note = 2'-O-methylguanosine-3'-phosphate
  modified_base 16: mod_base = OTHER; note = 2'-O-methyladenosine-3'-phosphate
  modified_base 17: mod_base = OTHER; note = 2'-O-methylguanosine-3'-phosphate
  modified_base 18: mod_base = OTHER; note = 2'-O-methylguanosine-3'-phosphate
  modified_base 19: mod_base = OTHER; note = 2'-O-methylguanosine-3'-phosphorothioate
  modified_base 20: mod_base = OTHER; note = 2'-O-methyladenosine-3'-phosphorothioate
  modified_base 21: mod_base = OTHER; note = 2'-O-methyladenosine
ggtcagagaaatgagagggaa

SEQ ID NO: 299 - RNA, 21 nt, synthetic construct
  source 1..21: mol_type = other RNA
  modified_base 1: mod_base = OTHER; note = 2'-O-methyluridine-3'-phosphorothioate
  modified_base 2: mod_base = OTHER; note = 2'-O-methylcytidine-3'-phosphorothioate
  modified_base 3: mod_base = OTHER; note = 2'-O-methyladenosine-3'-phosphate
  modified_base 4: mod_base = OTHER; note = 2'-O-methylguanosine-3'-phosphate
  modified_base 5: mod_base = OTHER; note = 2'-O-methyladenosine-3'-phosphate
  modified_base 6: mod_base = OTHER; note = 2'-O-hexadecyl-guanosine-3'-phosphate
  modified_base 7: mod_base = OTHER; note = 2'-deoxy-2'-fluoroadenosine-3'-phosphate
  modified_base 8: mod_base = OTHER; note = 2'-O-methyladenosine-3'-phosphate
  modified_base 9: mod_base = OTHER; note = 2'-deoxy-2'-fluoroadenosine-3'-phosphate
  modified_base 10: mod_base = OTHER; note = 2'-deoxy-2'-fluorouridine-3'-phosphate
  modified_base 11: mod_base = OTHER; note = 2'-deoxy-2'-fluoroguanosine-3'-phosphate
  modified_base 12: mod_base = OTHER; note = 2'-O-methyladenosine-3'-phosphate
  modified_base 13: mod_base = OTHER; note = 2'-O-methylguanosine-3'-phosphate
  modified_base 14: mod_base = OTHER; note = 2'-O-methyladenosine-3'-phosphate
  modified_base 15: mod_base = OTHER; note = 2'-O-methylguanosine-3'-phosphate
  modified_base 16: mod_base = OTHER; note = 2'-O-methylguanosine-3'-phosphate
  modified_base 17: mod_base = OTHER; note = 2'-O-methylguanosine-3'-phosphate
  modified_base 18: mod_base = OTHER; note = 2'-O-methyladenosine-3'-phosphate
  modified_base 19: mod_base = OTHER; note = 2'-O-methyladenosine-3'-phosphorothioate
  modified_base 20: mod_base = OTHER; note = 2'-O-methyladenosine-3'-phosphorothioate
  modified_base 21: mod_base = OTHER; note = 2'-O-methyladenosine
tcagagaaatgagagggaaaa

SEQ ID NO: 300 - RNA, 21 nt, synthetic construct
  source 1..21: mol_type = other RNA
  modified_base 1: mod_base = OTHER; note = 2'-O-methyladenosine-3'-phosphorothioate
  modified_base 2: mod_base = OTHER; note = 2'-O-methylguanosine-3'-phosphorothioate
  modified_base 3: mod_base = OTHER; note = 2'-O-methyladenosine-3'-phosphate
  modified_base 4: mod_base = OTHER; note = 2'-O-methylguanosine-3'-phosphate
  modified_base 5: mod_base = OTHER; note = 2'-O-methylguanosine-3'-phosphate
  modified_base 6: mod_base = OTHER; note = 2'-O-hexadecyl-guanosine-3'-phosphate
  modified_base 7: mod_base = OTHER; note = 2'-deoxy-2'-fluoroadenosine-3'-phosphate
  modified_base 8: mod_base = OTHER; note = 2'-O-methyladenosine-3'-phosphate
  modified_base 9: mod_base = OTHER; note = 2'-deoxy-2'-fluoroadenosine-3'-phosphate
  modified_base 10: mod_base = OTHER; note = 2'-deoxy-2'-fluoroguanosine-3'-phosphate
  modified_base 11: mod_base = OTHER; note = 2'-deoxy-2'-fluorouridine-3'-phosphate
  modified_base 12: mod_base = OTHER; note = 2'-O-methyladenosine-3'-phosphate
  modified_base 13: mod_base = OTHER; note = 2'-O-methyladenosine-3'-phosphate
  modified_base 14: mod_base = OTHER; note = 2'-O-methyladenosine-3'-phosphate
  modified_base 15: mod_base = OTHER; note = 2'-O-methyladenosine-3'-phosphate
  modified_base 16: mod_base = OTHER; note = 2'-O-methyladenosine-3'-phosphate
  modified_base 17: mod_base = OTHER; note = 2'-O-methyluridine-3'-phosphate
  modified_base 18: mod_base = OTHER; note = 2'-O-methylguanosine-3'-phosphate
  modified_base 19: mod_base = OTHER; note = 2'-O-methylcytidine-3'-phosphorothioate
  modified_base 20: mod_base = OTHER; note = 2'-O-methylguanosine-3'-phosphorothioate
  modified_base 21: mod_base = OTHER; note = 2'-O-methyladenosine
agagggaaagtaaaaatgcga

SEQ ID NO: 301 - RNA, 21 nt, synthetic construct
  source 1..21: mol_type = other RNA
  modified_base 1: mod_base = OTHER; note = 2'-O-methylguanosine-3'-phosphorothioate
  modified_base 2: mod_base = OTHER; note = 2'-O-methyladenosine-3'-phosphorothioate
  modified_base 3: mod_base = OTHER; note = 2'-O-methylguanosine-3'-phosphate
  modified_base 4: mod_base = OTHER; note = 2'-O-methylguanosine-3'-phosphate
  modified_base 5: mod_base = OTHER; note = 2'-O-methylguanosine-3'-phosphate
  modified_base 6: mod_base = OTHER; note = 2'-O-hexadecyl-adenosine-3'-phosphate
  modified_base 7: mod_base = OTHER; note = 2'-deoxy-2'-fluoroadenosine-3'-phosphate
  modified_base 8: mod_base = OTHER; note = 2'-O-methyladenosine-3'-phosphate
  modified_base 9: mod_base = OTHER; note = 2'-deoxy-2'-fluoroguanosine-3'-phosphate
  modified_base 10: mod_base = OTHER; note = 2'-deoxy-2'-fluorouridine-3'-phosphate
  modified_base 11: mod_base = OTHER; note = 2'-deoxy-2'-fluoroadenosine-3'-phosphate
  modified_base 12: mod_base = OTHER; note = 2'-O-methyladenosine-3'-phosphate
  modified_base 13: mod_base = OTHER; note = 2'-O-methyladenosine-3'-phosphate
  modified_base 14: mod_base = OTHER; note = 2'-O-methyladenosine-3'-phosphate
  modified_base 15: mod_base = OTHER; note = 2'-O-methyladenosine-3'-phosphate
  modified_base 16: mod_base = OTHER; note = 2'-O-methyluridine-3'-phosphate
  modified_base 17: mod_base = OTHER; note = 2'-O-methylguanosine-3'-phosphate
  modified_base 18: mod_base = OTHER; note = 2'-O-methylcytidine-3'-phosphate
  modified_base 19: mod_base = OTHER; note = 2'-O-methylguanosine-3'-phosphorothioate
  modified_base 20: mod_base = OTHER; note = 2'-O-methyluridine-3'-phosphorothioate
  modified_base 21: mod_base = OTHER; note = 2'-O-methyladenosine
gagggaaagtaaaaatgcgta

SEQ ID NO: 302 - RNA, 21 nt, synthetic construct
  source 1..21: mol_type = other RNA
  modified_base 1: mod_base = OTHER; note = 2'-O-methyladenosine-3'-phosphorothioate
  modified_base 2: mod_base = OTHER; note = 2'-O-methylguanosine-3'-phosphorothioate
  modified_base 3: mod_base = OTHER; note = 2'-O-methylguanosine-3'-phosphate
  modified_base 4: mod_base = OTHER; note = 2'-O-methylguanosine-3'-phosphate
  modified_base 5: mod_base = OTHER; note = 2'-O-methyladenosine-3'-phosphate
  modified_base 6: mod_base = OTHER; note = 2'-O-hexadecyl-adenosine-3'-phosphate
  modified_base 7: mod_base = OTHER; note = 2'-deoxy-2'-fluoroadenosine-3'-phosphate
  modified_base 8: mod_base = OTHER; note = 2'-O-methylguanosine-3'-phosphate
  modified_base 9: mod_base = OTHER; note = 2'-deoxy-2'-fluorouridine-3'-phosphate
  modified_base 10: mod_base = OTHER; note = 2'-deoxy-2'-fluoroadenosine-3'-phosphate
  modified_base 11: mod_base = OTHER; note = 2'-deoxy-2'-fluoroadenosine-3'-phosphate
  modified_base 12: mod_base = OTHER; note = 2'-O-methyladenosine-3'-phosphate
  modified_base 13: mod_base = OTHER; note = 2'-O-methyladenosine-3'-phosphate
  modified_base 14: mod_base = OTHER; note = 2'-O-methyladenosine-3'-phosphate
  modified_base 15: mod_base = OTHER; note = 2'-O-methyluridine-3'-phosphate
  modified_base 16: mod_base = OTHER; note = 2'-O-methylguanosine-3'-phosphate
  modified_base 17: mod_base = OTHER; note = 2'-O-methylcytidine-3'-phosphate
  modified_base 18: mod_base = OTHER; note = 2'-O-methylguanosine-3'-phosphate
  modified_base 19: mod_base = OTHER; note = 2'-O-methyluridine-3'-phosphorothioate
  modified_base 20: mod_base = OTHER; note = 2'-O-methylcytidine-3'-phosphorothioate
  modified_base 21: mod_base = OTHER; note = 2'-O-methyladenosine
agggaaagtaaaaatgcgtca

SEQ ID NO: 303 - RNA, 21 nt, synthetic construct
  source 1..21: mol_type = other RNA
  modified_base 1: mod_base = OTHER; note = 2'-O-methylguanosine-3'-phosphorothioate
  modified_base 2: mod_base = OTHER; note = 2'-O-methylguanosine-3'-phosphorothioate
  modified_base 3: mod_base = OTHER; note = 2'-O-methylguanosine-3'-phosphate
  modified_base 4: mod_base = OTHER; note = 2'-O-methyladenosine-3'-phosphate
  modified_base 5: mod_base = OTHER; note = 2'-O-methyladenosine-3'-phosphate
  modified_base 6: mod_base = OTHER; note = 2'-O-hexadecyl-adenosine-3'-phosphate
  modified_base 7: mod_base = OTHER; note = 2'-deoxy-2'-fluoroguanosine-3'-phosphate
  modified_base 8: mod_base = OTHER; note = 2'-O-methyluridine-3'-phosphate
  modified_base 9: mod_base = OTHER; note = 2'-deoxy-2'-fluoroadenosine-3'-phosphate
  modified_base 10: mod_base = OTHER; note = 2'-deoxy-2'-fluoroadenosine-3'-phosphate
  modified_base 11: mod_base = OTHER; note = 2'-deoxy-2'-fluoroadenosine-3'-phosphate
  modified_base 12: mod_base = OTHER; note = 2'-O-methyladenosine-3'-phosphate
  modified_base 13: mod_base = OTHER; note = 2'-O-methyladenosine-3'-phosphate
  modified_base 14: mod_base = OTHER; note = 2'-O-methyluridine-3'-phosphate
  modified_base 15: mod_base = OTHER; note = 2'-O-methylguanosine-3'-phosphate
  modified_base 16: mod_base = OTHER; note = 2'-O-methylcytidine-3'-phosphate
  modified_base 17: mod_base = OTHER; note = 2'-O-methylguanosine-3'-phosphate
  modified_base 18: mod_base = OTHER; note = 2'-O-methyluridine-3'-phosphate
  modified_base 19: mod_base = OTHER; note = 2'-O-methylcytidine-3'-phosphorothioate
  modified_base 20: mod_base = OTHER; note = 2'-O-methylguanosine-3'-phosphorothioate
  modified_base 21: mod_base = OTHER; note = 2'-O-methyladenosine
gggaaagtaaaaatgcgtcga

SEQ ID NO: 304 - RNA, 21 nt, synthetic construct
  source 1..21: mol_type = other RNA
  modified_base 1: mod_base = OTHER; note = 2'-O-methylguanosine-3'-phosphorothioate
  modified_base 2: mod_base = OTHER; note = 2'-O-methylguanosine-3'-phosphorothioate
  modified_base 3: mod_base = OTHER; note = 2'-O-methyladenosine-3'-phosphate
  modified_base 4: mod_base = OTHER; note = 2'-O-methyladenosine-3'-phosphate
  modified_base 5: mod_base = OTHER; note = 2'-O-methyladenosine-3'-phosphate
  modified_base 6: mod_base = OTHER; note = 2'-O-hexadecyl-guanosine-3'-phosphate
  modified_base 7: mod_base = OTHER; note = 2'-deoxy-2'-fluorouridine-3'-phosphate
  modified_base 8: mod_base = OTHER; note = 2'-O-methyladenosine-3'-phosphate
  modified_base 9: mod_base = OTHER; note = 2'-deoxy-2'-fluoroadenosine-3'-phosphate
  modified_base 10: mod_base = OTHER; note = 2'-deoxy-2'-fluoroadenosine-3'-phosphate
  modified_base 11: mod_base = OTHER; note = 2'-deoxy-2'-fluoroadenosine-3'-phosphate
  modified_base 12: mod_base = OTHER; note = 2'-O-methyladenosine-3'-phosphate
  modified_base 13: mod_base = OTHER; note = 2'-O-methyluridine-3'-phosphate
  modified_base 14: mod_base = OTHER; note = 2'-O-methylguanosine-3'-phosphate
  modified_base 15: mod_base = OTHER; note = 2'-O-methylcytidine-3'-phosphate
  modified_base 16: mod_base = OTHER; note = 2'-O-methylguanosine-3'-phosphate
  modified_base 17: mod_base = OTHER; note = 2'-O-methyluridine-3'-phosphate
  modified_base 18: mod_base = OTHER; note = 2'-O-methylcytidine-3'-phosphate
  modified_base 19: mod_base = OTHER; note = 2'-O-methylguanosine-3'-phosphorothioate
  modified_base 20: mod_base = OTHER; note = 2'-O-methyladenosine-3'-phosphorothioate
  modified_base 21: mod_base = OTHER; note = 2'-O-methyladenosine
ggaaagtaaaaatgcgtcgaa

SEQ ID NO: 305 - RNA, 21 nt, synthetic construct
  source 1..21: mol_type = other RNA
  modified_base 1: mod_base = OTHER; note = 2'-O-methylguanosine-3'-phosphorothioate
  modified_base 2: mod_base = OTHER; note = 2'-O-methyladenosine-3'-phosphorothioate
  modified_base 3: mod_base = OTHER; note = 2'-O-methyladenosine-3'-phosphate
  modified_base 4: mod_base = OTHER; note = 2'-O-methyladenosine-3'-phosphate
  modified_base 5: mod_base = OTHER; note = 2'-O-methylguanosine-3'-phosphate
  modified_base 6: mod_base = OTHER; note = 2'-O-hexadecyl-uridine-3'-phosphate
  modified_base 7: mod_base = OTHER; note = 2'-deoxy-2'-fluoroadenosine-3'-phosphate
  modified_base 8: mod_base = OTHER; note = 2'-O-methyladenosine-3'-phosphate
  modified_base 9: mod_base = OTHER; note = 2'-deoxy-2'-fluoroadenosine-3'-phosphate
  modified_base 10: mod_base = OTHER; note = 2'-deoxy-2'-fluoroadenosine-3'-phosphate
  modified_base 11: mod_base = OTHER; note = 2'-deoxy-2'-fluoroadenosine-3'-phosphate
  modified_base 12: mod_base = OTHER; note = 2'-O-methyluridine-3'-phosphate
  modified_base 13: mod_base = OTHER; note = 2'-O-methylguanosine-3'-phosphate
  modified_base 14: mod_base = OTHER; note = 2'-O-methylcytidine-3'-phosphate
  modified_base 15: mod_base = OTHER; note = 2'-O-methylguanosine-3'-phosphate
  modified_base 16: mod_base = OTHER; note = 2'-O-methyluridine-3'-phosphate
  modified_base 17: mod_base = OTHER; note = 2'-O-methylcytidine-3'-phosphate
  modified_base 18: mod_base = OTHER; note = 2'-O-methylguanosine-3'-phosphate
  modified_base 19: mod_base = OTHER; note = 2'-O-methyladenosine-3'-phosphorothioate
  modified_base 20: mod_base = OTHER; note = 2'-O-methylguanosine-3'-phosphorothioate
  modified_base 21: mod_base = OTHER; note = 2'-O-methyladenosine
gaaagtaaaaatgcgtcgaga

SEQ ID NO: 306 - RNA, 21 nt, synthetic construct
  source 1..21: mol_type = other RNA
  modified_base 1: mod_base = OTHER; note = 2'-O-methyladenosine-3'-phosphorothioate
  modified_base 2: mod_base = OTHER; note = 2'-O-methyladenosine-3'-phosphorothioate
  modified_base 3: mod_base = OTHER; note = 2'-O-methyladenosine-3'-phosphate
  modified_base 4: mod_base = OTHER; note = 2'-O-methylguanosine-3'-phosphate
  modified_base 5: mod_base = OTHER; note = 2'-O-methyluridine-3'-phosphate
  modified_base 6: mod_base = OTHER; note = 2'-O-hexadecyl-adenosine-3'-phosphate
  modified_base 7: mod_base = OTHER; note = 2'-deoxy-2'-fluoroadenosine-3'-phosphate
  modified_base 8: mod_base = OTHER; note = 2'-O-methyladenosine-3'-phosphate
  modified_base 9: mod_base = OTHER; note = 2'-deoxy-2'-fluoroadenosine-3'-phosphate
  modified_base 10: mod_base = OTHER; note = 2'-deoxy-2'-fluoroadenosine-3'-phosphate
  modified_base 11: mod_base = OTHER; note = 2'-deoxy-2'-fluorouridine-3'-phosphate
  modified_base 12: mod_base = OTHER; note = 2'-O-methylguanosine-3'-phosphate
  modified_base 13: mod_base = OTHER; note = 2'-O-methylcytidine-3'-phosphate
  modified_base 14: mod_base = OTHER; note = 2'-O-methylguanosine-3'-phosphate
  modified_base 15: mod_base = OTHER; note = 2'-O-methyluridine-3'-phosphate
  modified_base 16: mod_base = OTHER; note = 2'-O-methylcytidine-3'-phosphate
  modified_base 17: mod_base = OTHER; note = 2'-O-methylguanosine-3'-phosphate
  modified_base 18: mod_base = OTHER; note = 2'-O-methyladenosine-3'-phosphate
  modified_base 19: mod_base = OTHER; note = 2'-O-methylguanosine-3'-phosphorothioate
  modified_base 20: mod_base = OTHER; note = 2'-O-methylcytidine-3'-phosphorothioate
  modified_base 21: mod_base = OTHER; note = 2'-O-methyladenosine
aaagtaaaaatgcgtcgagca

SEQ ID NO: 307 - RNA, 21 nt, synthetic construct
  source 1..21: mol_type = other RNA
  modified_base 1: mod_base = OTHER; note = 2'-O-methyladenosine-3'-phosphorothioate
  modified_base 2: mod_base = OTHER; note = 2'-O-methyladenosine-3'-phosphorothioate
  modified_base 3: mod_base = OTHER; note = 2'-O-methylguanosine-3'-phosphate
  modified_base 4: mod_base = OTHER; note = 2'-O-methyluridine-3'-phosphate
  modified_base 5: mod_base = OTHER; note = 2'-O-methyladenosine-3'-phosphate
  modified_base 6: mod_base = OTHER; note = 2'-O-hexadecyl-adenosine-3'-phosphate
  modified_base 7: mod_base = OTHER; note = 2'-deoxy-2'-fluoroadenosine-3'-phosphate
  modified_base 8: mod_base = OTHER; note = 2'-O-methyladenosine-3'-phosphate
  modified_base 9: mod_base = OTHER; note = 2'-deoxy-2'-fluoroadenosine-3'-phosphate
  modified_base 10: mod_base = OTHER; note = 2'-deoxy-2'-fluorouridine-3'-phosphate
  modified_base 11: mod_base = OTHER; note = 2'-deoxy-2'-fluoroguanosine-3'-phosphate
  modified_base 12: mod_base = OTHER; note = 2'-O-methylcytidine-3'-phosphate
  modified_base 13: mod_base = OTHER; note = 2'-O-methylguanosine-3'-phosphate
  modified_base 14: mod_base = OTHER; note = 2'-O-methyluridine-3'-phosphate
  modified_base 15: mod_base = OTHER; note = 2'-O-methylcytidine-3'-phosphate
  modified_base 16: mod_base = OTHER; note = 2'-O-methylguanosine-3'-phosphate
  modified_base 17: mod_base = OTHER; note = 2'-O-methyladenosine-3'-phosphate
  modified_base 18: mod_base = OTHER; note = 2'-O-methylguanosine-3'-phosphate
  modified_base 19: mod_base = OTHER; note = 2'-O-methylcytidine-3'-phosphorothioate
  modified_base 20: mod_base = OTHER; note = 2'-O-methyluridine-3'-phosphorothioate
  modified_base 21: mod_base = OTHER; note = 2'-O-methyladenosine
aagtaaaaatgcgtcgagcta

SEQ ID NO: 308 - RNA, 21 nt, synthetic construct
  source 1..21: mol_type = other RNA
  modified_base 1: mod_base = OTHER; note = 2'-O-methyladenosine-3'-phosphorothioate
  modified_base 2: mod_base = OTHER; note = 2'-O-methylguanosine-3'-phosphorothioate
  modified_base 3: mod_base = OTHER; note = 2'-O-methyluridine-3'-phosphate
  modified_base 4: mod_base = OTHER; note = 2'-O-methyladenosine-3'-phosphate
  modified_base 5: mod_base = OTHER; note = 2'-O-methyladenosine-3'-phosphate
  modified_base 6: mod_base = OTHER; note = 2'-O-hexadecyl-adenosine-3'-phosphate
  modified_base 7: mod_base = OTHER; note = 2'-deoxy-2'-fluoroadenosine-3'-phosphate
  modified_base 8: mod_base = OTHER; note = 2'-O-methyladenosine-3'-phosphate
  modified_base 9: mod_base = OTHER; note = 2'-deoxy-2'-fluorouridine-3'-phosphate
  modified_base 10: mod_base = OTHER; note = 2'-deoxy-2'-fluoroguanosine-3'-phosphate
  modified_base 11: mod_base = OTHER; note = 2'-deoxy-2'-fluorocytidine-3'-phosphate
  modified_base 12: mod_base = OTHER; note = 2'-O-methylguanosine-3'-phosphate
  modified_base 13: mod_base = OTHER; note = 2'-O-methyluridine-3'-phosphate
  modified_base 14: mod_base = OTHER; note = 2'-O-methylcytidine-3'-phosphate
  modified_base 15: mod_base = OTHER; note = 2'-O-methylguanosine-3'-phosphate
  modified_base 16: mod_base = OTHER; note = 2'-O-methyladenosine-3'-phosphate
  modified_base 17: mod_base = OTHER; note = 2'-O-methylguanosine-3'-phosphate
  modified_base 18: mod_base = OTHER; note = 2'-O-methylcytidine-3'-phosphate
  modified_base 19: mod_base = OTHER; note = 2'-O-methyluridine-3'-phosphorothioate
  modified_base 20: mod_base = OTHER; note = 2'-O-methylcytidine-3'-phosphorothioate
  modified_base 21: mod_base = OTHER; note = 2'-O-methyladenosine
agtaaaaatgcgtcgagctca

SEQ ID NO: 309 - RNA, 21 nt, synthetic construct
  source 1..21: mol_type = other RNA
  modified_base 1: mod_base = OTHER; note = 2'-O-methylcytidine-3'-phosphorothioate
  modified_base 2: mod_base = OTHER; note = 2'-O-methylguanosine-3'-phosphorothioate
  modified_base 3: mod_base = OTHER; note = 2'-O-methyladenosine-3'-phosphate
  modified_base 4: mod_base = OTHER; note = 2'-O-methylcytidine-3'-phosphate
  modified_base 5: mod_base = OTHER; note = 2'-O-methyluridine-3'-phosphate
  modified_base 6: mod_base = OTHER; note = 2'-O-hexadecyl-cytidine-3'-phosphate
  modified_base 7: mod_base = OTHER; note = 2'-deoxy-2'-fluorocytidine-3'-phosphate
  modified_base 8: mod_base = OTHER; note = 2'-O-methyluridine-3'-phosphate
  modified_base 9: mod_base = OTHER; note = 2'-deoxy-2'-fluoroguanosine-3'-phosphate
  modified_base 10: mod_base = OTHER; note = 2'-deoxy-2'-fluoroadenosine-3'-phosphate
  modified_base 11: mod_base = OTHER; note = 2'-deoxy-2'-fluoroguanosine-3'-phosphate
  modified_base 12: mod_base = OTHER; note = 2'-O-methyluridine-3'-phosphate
  modified_base 13: mod_base = OTHER; note = 2'-O-methyluridine-3'-phosphate
  modified_base 14: mod_base = OTHER; note = 2'-O-methylcytidine-3'-phosphate
  modified_base 15: mod_base = OTHER; note = 2'-O-methylcytidine-3'-phosphate
  modified_base 16: mod_base = OTHER; note = 2'-O-methyladenosine-3'-phosphate
  modified_base 17: mod_base = OTHER; note = 2'-O-methylguanosine-3'-phosphate
  modified_base 18: mod_base = OTHER; note = 2'-O-methyladenosine-3'-phosphate
  modified_base 19: mod_base = OTHER; note = 2'-O-methylguanosine-3'-phosphorothioate
  modified_base 20: mod_base = OTHER; note = 2'-O-methylcytidine-3'-phosphorothioate
  modified_base 21: mod_base = OTHER; note = 2'-O-methyladenosine
cgactcctgagttccagagca

SEQ ID NO: 310 - RNA, 21 nt, synthetic construct
  source 1..21: mol_type = other RNA
  modified_base 1: mod_base = OTHER; note = 2'-O-methylguanosine-3'-phosphorothioate
  modified_base 2: mod_base = OTHER; note = 2'-O-methyladenosine-3'-phosphorothioate
  modified_base 3: mod_base = OTHER; note = 2'-O-methylcytidine-3'-phosphate
  modified_base 4: mod_base = OTHER; note = 2'-O-methyluridine-3'-phosphate
  modified_base 5: mod_base = OTHER; note = 2'-O-methylcytidine-3'-phosphate
  modified_base 6: mod_base = OTHER; note = 2'-O-hexadecyl-cytidine-3'-phosphate
  modified_base 7: mod_base = OTHER; note = 2'-deoxy-2'-fluorouridine-3'-phosphate
  modified_base 8: mod_base = OTHER; note = 2'-O-methylguanosine-3'-phosphate
  modified_base 9: mod_base = OTHER; note = 2'-deoxy-2'-fluoroadenosine-3'-phosphate
  modified_base 10: mod_base = OTHER; note = 2'-deoxy-2'-fluoroguanosine-3'-phosphate
  modified_base 11: mod_base = OTHER; note = 2'-deoxy-2'-fluorouridine-3'-phosphate
  modified_base 12: mod_base = OTHER; note = 2'-O-methyluridine-3'-phosphate
  modified_base 13: mod_base = OTHER; note = 2'-O-methylcytidine-3'-phosphate
  modified_base 14: mod_base = OTHER; note = 2'-O-methylcytidine-3'-phosphate
  modified_base 15: mod_base = OTHER; note = 2'-O-methyladenosine-3'-phosphate
  modified_base 16: mod_base = OTHER; note = 2'-O-methylguanosine-3'-phosphate
  modified_base 17: mod_base = OTHER; note = 2'-O-methyladenosine-3'-phosphate
  modified_base 18: mod_base = OTHER; note = 2'-O-methylguanosine-3'-phosphate
  modified_base 19: mod_base = OTHER; note = 2'-O-methylcytidine-3'-phosphorothioate
  modified_base 20: mod_base = OTHER; note = 2'-O-methyluridine-3'-phosphorothioate
  modified_base 21: mod_base = OTHER; note = 2'-O-methyladenosine
gactcctgagttccagagcta

SEQ ID NO: 311 - RNA, 21 nt, synthetic construct
  source 1..21: mol_type = other RNA
  modified_base 1: mod_base = OTHER; note = 2'-O-methyladenosine-3'-phosphorothioate
  modified_base 2: mod_base = OTHER; note = 2'-O-methylcytidine-3'-phosphorothioate
  modified_base 3: mod_base = OTHER; note = 2'-O-methyluridine-3'-phosphate
  modified_base 4: mod_base = OTHER; note = 2'-O-methylcytidine-3'-phosphate
  modified_base 5: mod_base = OTHER; note = 2'-O-methylcytidine-3'-phosphate
  modified_base 6: mod_base = OTHER; note = 2'-O-hexadecyl-uridine-3'-phosphate
  modified_base 7: mod_base = OTHER; note = 2'-deoxy-2'-fluoroguanosine-3'-phosphate
  modified_base 8: mod_base = OTHER; note = 2'-O-methyladenosine-3'-phosphate
  modified_base 9: mod_base = OTHER; note = 2'-deoxy-2'-fluoroguanosine-3'-phosphate
  modified_base 10: mod_base = OTHER; note = 2'-deoxy-2'-fluorouridine-3'-phosphate
  modified_base 11: mod_base = OTHER; note = 2'-deoxy-2'-fluorouridine-3'-phosphate
  modified_base 12: mod_base = OTHER; note = 2'-O-methylcytidine-3'-phosphate
  modified_base 13: mod_base = OTHER; note = 2'-O-methylcytidine-3'-phosphate
  modified_base 14: mod_base = OTHER; note = 2'-O-methyladenosine-3'-phosphate
  modified_base 15: mod_base = OTHER; note = 2'-O-methylguanosine-3'-phosphate
  modified_base 16: mod_base = OTHER; note = 2'-O-methyladenosine-3'-phosphate
  modified_base 17: mod_base = OTHER; note = 2'-O-methylguanosine-3'-phosphate
  modified_base 18: mod_base = OTHER; note = 2'-O-methylcytidine-3'-phosphate
  modified_base 19: mod_base = OTHER; note = 2'-O-methyluridine-3'-phosphorothioate
  modified_base 20: mod_base = OTHER; note = 2'-O-methyluridine-3'-phosphorothioate
  modified_base 21: mod_base = OTHER; note = 2'-O-methyladenosine
actcctgagttccagagctta

SEQ ID NO: 312 - RNA, 21 nt, synthetic construct
  source 1..21: mol_type = other RNA
  modified_base 1: mod_base = OTHER; note = 2'-O-methylcytidine-3'-phosphorothioate
  modified_base 2: mod_base = OTHER; note = 2'-O-methyluridine-3'-phosphorothioate
  modified_base 3: mod_base = OTHER; note = 2'-O-methylcytidine-3'-phosphate
  modified_base 4: mod_base = OTHER; note = 2'-O-methylcytidine-3'-phosphate
  modified_base 5: mod_base = OTHER; note = 2'-O-methyluridine-3'-phosphate
  modified_base 6: mod_base = OTHER; note = 2'-O-hexadecyl-guanosine-3'-phosphate
  modified_base 7: mod_base = OTHER; note = 2'-deoxy-2'-fluoroadenosine-3'-phosphate
  modified_base 8: mod_base = OTHER; note = 2'-O-methylguanosine-3'-phosphate
  modified_base 9: mod_base = OTHER; note = 2'-deoxy-2'-fluorouridine-3'-phosphate
  modified_base 10: mod_base = OTHER; note = 2'-deoxy-2'-fluorouridine-3'-phosphate
  modified_base 11: mod_base = OTHER; note = 2'-deoxy-2'-fluorocytidine-3'-phosphate
  modified_base 12: mod_base = OTHER; note = 2'-O-methylcytidine-3'-phosphate
  modified_base 13: mod_base = OTHER; note = 2'-O-methyladenosine-3'-phosphate
  modified_base 14: mod_base = OTHER; note = 2'-O-methylguanosine-3'-phosphate
  modified_base 15: mod_base = OTHER; note = 2'-O-methyladenosine-3'-phosphate
  modified_base 16: mod_base = OTHER; note = 2'-O-methylguanosine-3'-phosphate
  modified_base 17: mod_base = OTHER; note = 2'-O-methylcytidine-3'-phosphate
  modified_base 18: mod_base = OTHER; note = 2'-O-methyluridine-3'-phosphate
  modified_base 19: mod_base = OTHER; note = 2'-O-methyluridine-3'-phosphorothioate
  modified_base 20: mod_base = OTHER; note = 2'-O-methylguanosine-3'-phosphorothioate
  modified_base 21: mod_base = OTHER; note = 2'-O-methyladenosine
ctcctgagttccagagcttga

SEQ ID NO: 313 - RNA, 21 nt, synthetic construct
  source 1..21: mol_type = other RNA
  modified_base 1: mod_base = OTHER; note = 2'-O-methyluridine-3'-phosphorothioate
  modified_base 2: mod_base = OTHER; note = 2'-O-methylcytidine-3'-phosphorothioate
  modified_base 3: mod_base = OTHER; note = 2'-O-methylcytidine-3'-phosphate
  modified_base 4: mod_base = OTHER; note = 2'-O-methyluridine-3'-phosphate
  modified_base 5: mod_base = OTHER; note = 2'-O-methylguanosine-3'-phosphate
  modified_base 6: mod_base = OTHER; note = 2'-O-hexadecyl-adenosine-3'-phosphate
  modified_base 7: mod_base = OTHER; note = 2'-deoxy-2'-fluoroguanosine-3'-phosphate
  modified_base 8: mod_base = OTHER; note = 2'-O-methyluridine-3'-phosphate
  modified_base 9: mod_base = OTHER; note = 2'-deoxy-2'-fluorouridine-3'-phosphate
  modified_base 10: mod_base = OTHER; note = 2'-deoxy-2'-fluorocytidine-3'-phosphate
  modified_base 11: mod_base = OTHER; note = 2'-deoxy-2'-fluorocytidine-3'-phosphate
  modified_base 12: mod_base = OTHER; note = 2'-O-methyladenosine-3'-phosphate
  modified_base 13: mod_base = OTHER; note = 2'-O-methylguanosine-3'-phosphate
  modified_base 14: mod_base = OTHER; note = 2'-O-methyladenosine-3'-phosphate
  modified_base 15: mod_base = OTHER; note = 2'-O-methylguanosine-3'-phosphate
  modified_base 16: mod_base = OTHER; note = 2'-O-methylcytidine-3'-phosphate
  modified_base 17: mod_base = OTHER; note = 2'-O-methyluridine-3'-phosphate
  modified_base 18: mod_base = OTHER; note = 2'-O-methyluridine-3'-phosphate
  modified_base 19: mod_base = OTHER; note = 2'-O-methylguanosine-3'-phosphorothioate
  modified_base 20: mod_base = OTHER; note = 2'-O-methylcytidine-3'-phosphorothioate
  modified_base 21: mod_base = OTHER; note = 2'-O-methyladenosine
tcctgagttccagagcttgca

SEQ ID NO: 314 - RNA, 21 nt, synthetic construct
  source 1..21: mol_type = other RNA
  modified_base 1: mod_base = OTHER; note = 2'-O-methylcytidine-3'-phosphorothioate
  modified_base 2: mod_base = OTHER; note = 2'-O-methylcytidine-3'-phosphorothioate
  modified_base 3: mod_base = OTHER; note = 2'-O-methyluridine-3'-phosphate
  modified_base 4: mod_base = OTHER; note = 2'-O-methylguanosine-3'-phosphate
  modified_base 5: mod_base = OTHER; note = 2'-O-methyladenosine-3'-phosphate
  modified_base 6: mod_base = OTHER; note = 2'-O-hexadecyl-guanosine-3'-phosphate
  modified_base 7: mod_base = OTHER; note = 2'-deoxy-2'-fluorouridine-3'-phosphate
  modified_base 8: mod_base = OTHER; note = 2'-O-methyluridine-3'-phosphate
  modified_base 9: mod_base = OTHER; note = 2'-deoxy-2'-fluorocytidine-3'-phosphate
  modified_base 10: mod_base = OTHER; note = 2'-deoxy-2'-fluorocytidine-3'-phosphate
  modified_base 11: mod_base = OTHER; note = 2'-deoxy-2'-fluoroadenosine-3'-phosphate
  modified_base 12: mod_base = OTHER; note = 2'-O-methylguanosine-3'-phosphate
  modified_base 13: mod_base = OTHER; note = 2'-O-methyladenosine-3'-phosphate
  modified_base 14: mod_base = OTHER; note = 2'-O-methylguanosine-3'-phosphate
  modified_base 15: mod_base = OTHER; note = 2'-O-methylcytidine-3'-phosphate
  modified_base 16: mod_base = OTHER; note = 2'-O-methyluridine-3'-phosphate
  modified_base 17: mod_base = OTHER; note = 2'-O-methyluridine-3'-phosphate
  modified_base 18: mod_base = OTHER; note = 2'-O-methylguanosine-3'-phosphate
  modified_base 19: mod_base = OTHER; note = 2'-O-methylcytidine-3'-phosphorothioate
  modified_base 20: mod_base = OTHER; note = 2'-O-methyluridine-3'-phosphorothioate
  modified_base 21: mod_base = OTHER; note = 2'-O-methyladenosine
cctgagttccagagcttgcta

SEQ ID NO: 315 - RNA, 21 nt, synthetic construct
  source 1..21: mol_type = other RNA
  modified_base 1: mod_base = OTHER; note = 2'-O-methylguanosine-3'-phosphorothioate
  modified_base 2: mod_base = OTHER; note = 2'-O-methyladenosine-3'-phosphorothioate
  modified_base 3: mod_base = OTHER; note = 2'-O-methylguanosine-3'-phosphate
  modified_base 4: mod_base = OTHER; note = 2'-O-methyluridine-3'-phosphate
  modified_base 5: mod_base = OTHER; note = 2'-O-methyluridine-3'-phosphate
  modified_base 6: mod_base = OTHER; note = 2'-O-hexadecyl-cytidine-3'-phosphate
  modified_base 7: mod_base = OTHER; note = 2'-deoxy-2'-fluorocytidine-3'-phosphate
  modified_base 8: mod_base = OTHER; note = 2'-O-methyladenosine-3'-phosphate
  modified_base 9: mod_base = OTHER; note = 2'-deoxy-2'-fluoroguanosine-3'-phosphate
  modified_base 10: mod_base = OTHER; note = 2'-deoxy-2'-fluoroadenosine-3'-phosphate
  modified_base 11: mod_base = OTHER; note = 2'-deoxy-2'-fluoroguanosine-3'-phosphate
  modified_base 12: mod_base = OTHER; note = 2'-O-methylcytidine-3'-phosphate
  modified_base 13: mod_base = OTHER; note = 2'-O-methyluridine-3'-phosphate
  modified_base 14: mod_base = OTHER; note = 2'-O-methyluridine-3'-phosphate
  modified_base 15: mod_base = OTHER; note = 2'-O-methylguanosine-3'-phosphate
  modified_base 16: mod_base = OTHER; note = 2'-O-methylcytidine-3'-phosphate
  modified_base 17: mod_base = OTHER; note = 2'-O-methyluridine-3'-phosphate
  modified_base 18: mod_base = OTHER; note = 2'-O-methyladenosine-3'-phosphate
  modified_base 19: mod_base = OTHER; note = 2'-O-methylcytidine-3'-phosphorothioate
  modified_base 20: mod_base = OTHER; note = 2'-O-methyladenosine-3'-phosphorothioate
  modified_base 21: mod_base = OTHER; note = 2'-O-methyladenosine
gagttccagagcttgctacaa

SEQ ID NO: 316 - RNA, 21 nt, synthetic construct
  source 1..21: mol_type = other RNA
  modified_base 1: mod_base = OTHER; note = 2'-O-methyladenosine-3'-phosphorothioate
  modified_base 2: mod_base = OTHER; note = 2'-O-methylguanosine-3'-phosphorothioate
  modified_base 3: mod_base = OTHER; note = 2'-O-methyluridine-3'-phosphate
  modified_base 4: mod_base = OTHER; note = 2'-O-methyluridine-3'-phosphate
  modified_base 5: mod_base = OTHER; note = 2'-O-methylcytidine-3'-phosphate
  modified_base 6: mod_base = OTHER; note = 2'-O-hexadecyl-cytidine-3'-phosphate
  modified_base 7: mod_base = OTHER; note = 2'-deoxy-2'-fluoroadenosine-3'-phosphate
  modified_base 8: mod_base = OTHER; note = 2'-O-methylguanosine-3'-phosphate
  modified_base 9: mod_base = OTHER; note = 2'-deoxy-2'-fluoroadenosine-3'-phosphate
  modified_base 10: mod_base = OTHER; note = 2'-deoxy-2'-fluoroguanosine-3'-phosphate
  modified_base 11: mod_base = OTHER; note = 2'-deoxy-2'-fluorocytidine-3'-phosphate
  modified_base 12: mod_base = OTHER; note = 2'-O-methyluridine-3'-phosphate
  modified_base 13: mod_base = OTHER; note = 2'-O-methyluridine-3'-phosphate
  modified_base 14: mod_base = OTHER; note = 2'-O-methylguanosine-3'-phosphate
  modified_base 15: mod_base = OTHER; note = 2'-O-methylcytidine-3'-phosphate
  modified_base 16: mod_base = OTHER; note = 2'-O-methyluridine-3'-phosphate
  modified_base 17: mod_base = OTHER; note = 2'-O-methyladenosine-3'-phosphate
  modified_base 18: mod_base = OTHER; note = 2'-O-methylcytidine-3'-phosphate
  modified_base 19: mod_base = OTHER; note = 2'-O-methyladenosine-3'-phosphorothioate
  modified_base 20: mod_base = OTHER; note = 2'-O-methylguanosine-3'-phosphorothioate
  modified_base 21: mod_base = OTHER; note = 2'-O-methyladenosine
agttccagagcttgctacaga

SEQ ID NO: 317 - RNA, 21 nt, synthetic construct
  source 1..21: mol_type = other RNA
  modified_base 1: mod_base = OTHER; note = 2'-O-methylguanosine-3'-phosphorothioate
  modified_base 2: mod_base = OTHER; note = 2'-O-methyluridine-3'-phosphorothioate
  modified_base 3: mod_base = OTHER; note = 2'-O-methyluridine-3'-phosphate
  modified_base 4: mod_base = OTHER; note = 2'-O-methylcytidine-3'-phosphate
  modified_base 5: mod_base = OTHER; note = 2'-O-methylcytidine-3'-phosphate
  modified_base 6: mod_base = OTHER; note = 2'-O-hexadecyl-adenosine-3'-phosphate
  modified_base 7: mod_base = OTHER; note = 2'-deoxy-2'-fluoroguanosine-3'-phosphate
  modified_base 8: mod_base = OTHER; note = 2'-O-methyladenosine-3'-phosphate
  modified_base 9: mod_base = OTHER; note = 2'-deoxy-2'-fluoroguanosine-3'-phosphate
  modified_base 10: mod_base = OTHER; note = 2'-deoxy-2'-fluorocytidine-3'-phosphate
  modified_base 11: mod_base = OTHER; note = 2'-deoxy-2'-fluorouridine-3'-phosphate
  modified_base 12: mod_base = OTHER; note = 2'-O-methyluridine-3'-phosphate
  modified_base 13: mod_base = OTHER; note = 2'-O-methylguanosine-3'-phosphate
  modified_base 14: mod_base = OTHER; note = 2'-O-methylcytidine-3'-phosphate
  modified_base 15: mod_base = OTHER; note = 2'-O-methyluridine-3'-phosphate
  modified_base 16: mod_base = OTHER; note = 2'-O-methyladenosine-3'-phosphate
  modified_base 17: mod_base = OTHER; note = 2'-O-methylcytidine-3'-phosphate
  modified_base 18: mod_base = OTHER; note = 2'-O-methyladenosine-3'-phosphate
  modified_base 19: mod_base = OTHER; note = 2'-O-methylguanosine-3'-phosphorothioate
  modified_base 20: mod_base = OTHER; note = 2'-O-methylguanosine-3'-phosphorothioate
  modified_base 21: mod_base = OTHER; note = 2'-O-methyladenosine
gttccagagcttgctacagga

SEQ ID NO: 318 - RNA, 21 nt, synthetic construct
  source 1..21: mol_type = other RNA
  modified_base 1: mod_base = OTHER; note = 2'-O-methyluridine-3'-phosphorothioate
  modified_base 2: mod_base = OTHER; note = 2'-O-methyluridine-3'-phosphorothioate
  modified_base 3: mod_base = OTHER; note = 2'-O-methylcytidine-3'-phosphate
  modified_base 4: mod_base = OTHER; note = 2'-O-methylcytidine-3'-phosphate
  modified_base 5: mod_base = OTHER; note = 2'-O-methyladenosine-3'-phosphate
  modified_base 6: mod_base = OTHER; note = 2'-O-hexadecyl-guanosine-3'-phosphate
  modified_base 7: mod_base = OTHER; note = 2'-deoxy-2'-fluoroadenosine-3'-phosphate
  modified_base 8: mod_base = OTHER; note = 2'-O-methylguanosine-3'-phosphate
  modified_base 9: mod_base = OTHER; note = 2'-deoxy-2'-fluorocytidine-3'-phosphate
  modified_base 10: mod_base = OTHER; note = 2'-deoxy-2'-fluorouridine-3'-phosphate
  modified_base 11: mod_base = OTHER; note = 2'-deoxy-2'-fluorouridine-3'-phosphate
  modified_base 12: mod_base = OTHER; note = 2'-O-methylguanosine-3'-phosphate
  modified_base 13: mod_base = OTHER; note = 2'-O-methylcytidine-3'-phosphate
  modified_base 14: mod_base = OTHER; note = 2'-O-methyluridine-3'-phosphate
  modified_base 15: mod_base = OTHER; note = 2'-O-methyladenosine-3'-phosphate
  modified_base 16: mod_base = OTHER; note = 2'-O-methylcytidine-3'-phosphate
  modified_base 17: mod_base = OTHER; note = 2'-O-methyladenosine-3'-phosphate
  modified_base 18: mod_base = OTHER; note = 2'-O-methylguanosine-3'-phosphate
  modified_base 19: mod_base = OTHER; note = 2'-O-methylguanosine-3'-phosphorothioate
  modified_base 20: mod_base = OTHER; note = 2'-O-methylcytidine-3'-phosphorothioate
  modified_base 21: mod_base = OTHER; note = 2'-O-methyladenosine
ttccagagcttgctacaggca

SEQ ID NO: 319 - RNA, 21 nt, synthetic construct
  source 1..21: mol_type = other RNA
  modified_base 1: mod_base = OTHER; note = 2'-O-methyluridine-3'-phosphorothioate
  modified_base 2: mod_base = OTHER; note = 2'-O-methylcytidine-3'-phosphorothioate
  modified_base 3: mod_base = OTHER; note = 2'-O-methylcytidine-3'-phosphate
  modified_base 4: mod_base = OTHER; note = 2'-O-methyladenosine-3'-phosphate
  modified_base 5: mod_base = OTHER; note = 2'-O-methylguanosine-3'-phosphate
  modified_base 6: mod_base = OTHER; note = 2'-O-hexadecyl-adenosine-3'-phosphate
  modified_base 7: mod_base = OTHER; note = 2'-deoxy-2'-fluoroguanosine-3'-phosphate
  modified_base 8: mod_base = OTHER; note = 2'-O-methylcytidine-3'-phosphate
  modified_base 9: mod_base = OTHER; note = 2'-deoxy-2'-fluorouridine-3'-phosphate
  modified_base 10: mod_base = OTHER; note = 2'-deoxy-2'-fluorouridine-3'-phosphate
  modified_base 11: mod_base = OTHER; note = 2'-deoxy-2'-fluoroguanosine-3'-phosphate
  modified_base 12: mod_base = OTHER; note = 2'-O-methylcytidine-3'-phosphate
  modified_base 13: mod_base = OTHER; note = 2'-O-methyluridine-3'-phosphate
  modified_base 14: mod_base = OTHER; note = 2'-O-methyladenosine-3'-phosphate
  modified_base 15: mod_base = OTHER; note = 2'-O-methylcytidine-3'-phosphate
  modified_base 16: mod_base = OTHER; note = 2'-O-methyladenosine-3'-phosphate
  modified_base 17: mod_base = OTHER; note = 2'-O-methylguanosine-3'-phosphate
  modified_base 18: mod_base = OTHER; note = 2'-O-methylguanosine-3'-phosphate
  modified_base 19: mod_base = OTHER; note = 2'-O-methylcytidine-3'-phosphorothioate
  modified_base 20: mod_base = OTHER; note = 2'-O-methyluridine-3'-phosphorothioate
  modified_base 21: mod_base = OTHER; note = 2'-O-methyladenosine
tccagagcttgctacaggcta

SEQ ID NO: 320 - RNA, 21 nt, synthetic construct
  source 1..21: mol_type = other RNA
  modified_base 1: mod_base = OTHER; note = 2'-O-methylcytidine-3'-phosphorothioate
  modified_base 2: mod_base = OTHER; note = 2'-O-methylcytidine-3'-phosphorothioate
  modified_base 3: mod_base = OTHER; note = 2'-O-methyladenosine-3'-phosphate
  modified_base 4: mod_base = OTHER; note = 2'-O-methylguanosine-3'-phosphate
  modified_base 5: mod_base = OTHER; note = 2'-O-methyladenosine-3'-phosphate
  modified_base 6: mod_base = OTHER; note = 2'-O-hexadecyl-guanosine-3'-phosphate
  modified_base 7: mod_base = OTHER; note = 2'-deoxy-2'-fluorocytidine-3'-phosphate
  modified_base 8: mod_base = OTHER; note = 2'-O-methyluridine-3'-phosphate
  modified_base 9: mod_base = OTHER; note = 2'-deoxy-2'-fluorouridine-3'-phosphate
  modified_base 10: mod_base = OTHER; note = 2'-deoxy-2'-fluoroguanosine-3'-phosphate
  modified_base 11: mod_base = OTHER; note = 2'-deoxy-2'-fluorocytidine-3'-phosphate
  modified_base 12: mod_base = OTHER; note = 2'-O-methyluridine-3'-phosphate
  modified_base 13: mod_base = OTHER; note = 2'-O-methyladenosine-3'-phosphate
  modified_base 14: mod_base = OTHER; note = 2'-O-methylcytidine-3'-phosphate
  modified_base 15: mod_base = OTHER; note = 2'-O-methyladenosine-3'-phosphate
  modified_base 16: mod_base = OTHER; note = 2'-O-methylguanosine-3'-phosphate
  modified_base 17: mod_base = OTHER; note = 2'-O-methylguanosine-3'-phosphate
  modified_base 18: mod_base = OTHER; note = 2'-O-methylcytidine-3'-phosphate
  modified_base 19: mod_base = OTHER; note = 2'-O-methyluridine-3'-phosphorothioate
  modified_base 20: mod_base = OTHER; note = 2'-O-methylguanosine-3'-phosphorothioate
  modified_base 21: mod_base = OTHER; note = 2'-O-methyladenosine
ccagagcttgctacaggctga

SEQ ID NO: 321 - RNA, 21 nt, synthetic construct
  source 1..21: mol_type = other RNA
  modified_base 1: mod_base = OTHER; note = 2'-O-methylcytidine-3'-phosphorothioate
  modified_base 2: mod_base = OTHER; note = 2'-O-methyladenosine-3'-phosphorothioate
  modified_base 3: mod_base = OTHER; note = 2'-O-methylguanosine-3'-phosphate
  modified_base 4: mod_base = OTHER; note = 2'-O-methyladenosine-3'-phosphate
  modified_base 5: mod_base = OTHER; note = 2'-O-methylguanosine-3'-phosphate
  modified_base 6: mod_base = OTHER; note = 2'-O-hexadecyl-cytidine-3'-phosphate
  modified_base 7: mod_base = OTHER; note = 2'-deoxy-2'-fluorouridine-3'-phosphate
  modified_base 8: mod_base = OTHER; note = 2'-O-methyluridine-3'-phosphate
  modified_base 9: mod_base = OTHER; note = 2'-deoxy-2'-fluoroguanosine-3'-phosphate
  modified_base 10: mod_base = OTHER; note = 2'-deoxy-2'-fluorocytidine-3'-phosphate
  modified_base 11: mod_base = OTHER; note = 2'-deoxy-2'-fluorouridine-3'-phosphate
  modified_base 12: mod_base = OTHER; note = 2'-O-methyladenosine-3'-phosphate
  modified_base 13: mod_base = OTHER; note = 2'-O-methylcytidine-3'-phosphate
  modified_base 14: mod_base = OTHER; note = 2'-O-methyladenosine-3'-phosphate
  modified_base 15: mod_base = OTHER; note = 2'-O-methylguanosine-3'-phosphate
  modified_base 16: mod_base = OTHER; note = 2'-O-methylguanosine-3'-phosphate
  modified_base 17: mod_base = OTHER; note = 2'-O-methylcytidine-3'-phosphate
  modified_base 18: mod_base = OTHER; note = 2'-O-methyluridine-3'-phosphate
  modified_base 19: mod_base = OTHER; note = 2'-O-methylguanosine-3'-phosphorothioate
  modified_base 20: mod_base = OTHER; note = 2'-O-methylcytidine-3'-phosphorothioate
  modified_base 21: mod_base = OTHER; note = 2'-O-methyladenosine
cagagcttgctacaggctgca

SEQ ID NO: 322 - RNA, 21 nt, synthetic construct
  source 1..21: mol_type = other RNA
  modified_base 1: mod_base = OTHER; note = 2'-O-methyluridine-3'-phosphorothioate
  modified_base 2: mod_base = OTHER; note = 2'-O-methyladenosine-3'-phosphorothioate
  modified_base 3: mod_base = OTHER; note = 2'-O-methylcytidine-3'-phosphate
  modified_base 4: mod_base = OTHER; note = 2'-O-methyladenosine-3'-phosphate
  modified_base 5: mod_base = OTHER; note = 2'-O-methylguanosine-3'-phosphate
  modified_base 6: mod_base = OTHER; note = 2'-O-hexadecyl-guanosine-3'-phosphate
  modified_base 7: mod_base = OTHER; note = 2'-deoxy-2'-fluorocytidine-3'-phosphate
  modified_base 8: mod_base = OTHER; note = 2'-O-methyluridine-3'-phosphate
  modified_base 9: mod_base = OTHER; note = 2'-deoxy-2'-fluoroguanosine-3'-phosphate
  modified_base 10: mod_base = OTHER; note = 2'-deoxy-2'-fluorocytidine-3'-phosphate
  modified_base 11: mod_base = OTHER; note = 2'-deoxy-2'-fluoroguanosine-3'-phosphate
  modified_base 12: mod_base = OTHER; note = 2'-O-methylguanosine-3'-phosphate
  modified_base 13: mod_base = OTHER; note = 2'-O-methyluridine-3'-phosphate
  modified_base 14: mod_base = OTHER; note = 2'-O-methyluridine-3'-phosphate
  modified_base 15: mod_base = OTHER; note = 2'-O-methylguanosine-3'-phosphate
  modified_base 16: mod_base = OTHER; note = 2'-O-methyluridine-3'-phosphate
  modified_base 17: mod_base = OTHER; note = 2'-O-methyluridine-3'-phosphate
  modified_base 18: mod_base = OTHER; note = 2'-O-methyluridine-3'-phosphate
  modified_base 19: mod_base = OTHER; note = 2'-O-methylcytidine-3'-phosphorothioate
  modified_base 20: mod_base = OTHER; note = 2'-O-methylcytidine-3'-phosphorothioate
  modified_base 21: mod_base = OTHER; note = 2'-O-methyladenosine
tacaggctgcggttgtttcca

SEQ ID NO: 323 - RNA, 21 nt, synthetic construct
  source 1..21: mol_type = other RNA
  modified_base 1: mod_base = OTHER; note = 2'-O-methylguanosine-3'-phosphorothioate
  modified_base 2: mod_base = OTHER; note = 2'-O-methylcytidine-3'-phosphorothioate
  modified_base 3: mod_base = OTHER; note = 2'-O-methyluridine-3'-phosphate
  modified_base 4: mod_base = OTHER; note = 2'-O-methylguanosine-3'-phosphate
  modified_base 5: mod_base = OTHER; note = 2'-O-methylcytidine-3'-phosphate
  modified_base 6: mod_base = OTHER; note = 2'-O-hexadecyl-guanosine-3'-phosphate
  modified_base 7: mod_base = OTHER; note = 2'-deoxy-2'-fluoroguanosine-3'-phosphate
  modified_base 8: mod_base = OTHER; note = 2'-O-methyluridine-3'-phosphate
  modified_base 9: mod_base = OTHER; note = 2'-deoxy-2'-fluorouridine-3'-phosphate
  modified_base 10: mod_base = OTHER; note = 2'-deoxy-2'-fluoroguanosine-3'-phosphate
  modified_base 11: mod_base = OTHER; note = 2'-deoxy-2'-fluorouridine-3'-phosphate
  modified_base 12: mod_base = OTHER; note = 2'-O-methyluridine-3'-phosphate
  modified_base 13: mod_base = OTHER; note = 2'-O-methyluridine-3'-phosphate
  modified_base 14: mod_base = OTHER; note = 2'-O-methylcytidine-3'-phosphate
  modified_base 15: mod_base = OTHER; note = 2'-O-methylcytidine-3'-phosphate
  modified_base 16: mod_base = OTHER; note = 2'-O-methylcytidine-3'-phosphate
  modified_base 17: mod_base = OTHER; note = 2'-O-methyluridine-3'-phosphate
  modified_base 18: mod_base = OTHER; note = 2'-O-methylcytidine-3'-phosphate
  modified_base 19: mod_base = OTHER; note = 2'-O-methylcytidine-3'-phosphorothioate
  modified_base 20: mod_base = OTHER; note = 2'-O-methyluridine-3'-phosphorothioate
  modified_base 21: mod_base = OTHER; note = 2'-O-methyladenosine
gctgcggttgtttccctccta

SEQ ID NO: 324 - RNA, 21 nt, synthetic construct
  source 1..21: mol_type = other RNA
  modified_base 1: mod_base = OTHER; note = 2'-O-methylcytidine-3'-phosphorothioate
  modified_base 2: mod_base = OTHER; note = 2'-O-methyluridine-3'-phosphorothioate
  modified_base 3: mod_base = OTHER; note = 2'-O-methylguanosine-3'-phosphate
  modified_base 4: mod_base = OTHER; note = 2'-O-methylcytidine-3'-phosphate
  modified_base 5: mod_base = OTHER; note = 2'-O-methylguanosine-3'-phosphate
  modified_base 6: mod_base = OTHER; note = 2'-O-hexadecyl-guanosine-3'-phosphate
  modified_base 7: mod_base = OTHER; note = 2'-deoxy-2'-fluorouridine-3'-phosphate
  modified_base 8: mod_base = OTHER; note = 2'-O-methyluridine-3'-phosphate
  modified_base 9: mod_base = OTHER; note = 2'-deoxy-2'-fluoroguanosine-3'-phosphate
  modified_base 10: mod_base = OTHER; note = 2'-deoxy-2'-fluorouridine-3'-phosphate
  modified_base 11: mod_base = OTHER; note = 2'-deoxy-2'-fluorouridine-3'-phosphate
  modified_base 12: mod_base = OTHER; note = 2'-O-methyluridine-3'-phosphate
  modified_base 13: mod_base = OTHER; note = 2'-O-methylcytidine-3'-phosphate
  modified_base 14: mod_base = OTHER; note = 2'-O-methylcytidine-3'-phosphate
  modified_base 15: mod_base = OTHER; note = 2'-O-methylcytidine-3'-phosphate
  modified_base 16: mod_base = OTHER; note = 2'-O-methyluridine-3'-phosphate
  modified_base 17: mod_base = OTHER; note = 2'-O-methylcytidine-3'-phosphate
  modified_base 18: mod_base = OTHER; note = 2'-O-methylcytidine-3'-phosphate
  modified_base 19: mod_base = OTHER; note = 2'-O-methyluridine-3'-phosphorothioate
  modified_base 20: mod_base = OTHER; note = 2'-O-methyluridine-3'-phosphorothioate
  modified_base 21: mod_base = OTHER; note = 2'-O-methyladenosine
ctgcggttgtttccctcctta

SEQ ID NO: 325 - RNA, 21 nt, synthetic construct
  source 1..21: mol_type = other RNA
  modified_base 1: mod_base = OTHER; note = 2'-O-methylguanosine-3'-phosphorothioate
  modified_base 2: mod_base = OTHER; note = 2'-O-methylcytidine-3'-phosphorothioate
  modified_base 3: mod_base = OTHER; note = 2'-O-methylguanosine-3'-phosphate
  modified_base 4: mod_base = OTHER; note = 2'-O-methylguanosine-3'-phosphate
  modified_base 5: mod_base = OTHER; note = 2'-O-methyluridine-3'-phosphate
  modified_base 6: mod_base = OTHER; note = 2'-O-hexadecyl-uridine-3'-phosphate
  modified_base 7: mod_base = OTHER; note = 2'-deoxy-2'-fluoroguanosine-3'-phosphate
  modified_base 8: mod_base = OTHER; note = 2'-O-methyluridine-3'-phosphate
  modified_base 9: mod_base = OTHER; note = 2'-deoxy-2'-fluorouridine-3'-phosphate
  modified_base 10: mod_base = OTHER; note = 2'-deoxy-2'-fluorouridine-3'-phosphate
  modified_base 11: mod_base = OTHER; note = 2'-deoxy-2'-fluorocytidine-3'-phosphate
  modified_base 12: mod_base = OTHER; note = 2'-O-methylcytidine-3'-phosphate
  modified_base 13: mod_base = OTHER; note = 2'-O-methylcytidine-3'-phosphate
  modified_base 14: mod_base = OTHER; note = 2'-O-methyluridine-3'-phosphate
  modified_base 15: mod_base = OTHER; note = 2'-O-methylcytidine-3'-phosphate
  modified_base 16: mod_base = OTHER; note = 2'-O-methylcytidine-3'-phosphate
  modified_base 17: mod_base = OTHER; note = 2'-O-methyluridine-3'-phosphate
  modified_base 18: mod_base = OTHER; note = 2'-O-methyluridine-3'-phosphate
  modified_base 19: mod_base = OTHER; note = 2'-O-methylguanosine-3'-phosphorothioate
  modified_base 20: mod_base = OTHER; note = 2'-O-methyluridine-3'-phosphorothioate
  modified_base 21: mod_base = OTHER; note = 2'-O-methyladenosine
gcggttgtttccctccttgta

SEQ ID NO: 326 - RNA, 21 nt, synthetic construct
  source 1..21: mol_type = other RNA
  modified_base 1: mod_base = OTHER; note = 2'-O-methylcytidine-3'-phosphorothioate
  modified_base 2: mod_base = OTHER; note = 2'-O-methylguanosine-3'-phosphorothioate
  modified_base 3: mod_base = OTHER; note = 2'-O-methylguanosine-3'-phosphate
  modified_base 4: mod_base = OTHER; note = 2'-O-methyluridine-3'-phosphate
  modified_base 5: mod_base = OTHER; note = 2'-O-methyluridine-3'-phosphate
  modified_base 6: mod_base = OTHER; note = 2'-O-hexadecyl-guanosine-3'-phosphate
  modified_base 7: mod_base = OTHER; note = 2'-deoxy-2'-fluorouridine-3'-phosphate
  modified_base 8: mod_base = OTHER; note = 2'-O-methyluridine-3'-phosphate
  modified_base 9: mod_base = OTHER; note = 2'-deoxy-2'-fluorouridine-3'-phosphate
  modified_base 10: mod_base = OTHER; note = 2'-deoxy-2'-fluorocytidine-3'-phosphate
  modified_base 11: mod_base = OTHER; note = 2'-deoxy-2'-fluorocytidine-3'-phosphate
  modified_base 12: mod_base = OTHER; note = 2'-O-methylcytidine-3'-phosphate
  modified_base 13: mod_base = OTHER; note = 2'-O-methyluridine-3'-phosphate
  modified_base 14: mod_base = OTHER; note = 2'-O-methylcytidine-3'-phosphate
  modified_base 15: mod_base = OTHER; note = 2'-O-methylcytidine-3'-phosphate
  modified_base 16: mod_base = OTHER; note = 2'-O-methyluridine-3'-phosphate
  modified_base 17: mod_base = OTHER; note = 2'-O-methyluridine-3'-phosphate
  modified_base 18: mod_base = OTHER; note = 2'-O-methylguanosine-3'-phosphate
  modified_base 19: mod_base = OTHER; note = 2'-O-methyluridine-3'-phosphorothioate
  modified_base 20: mod_base = OTHER; note = 2'-O-methyluridine-3'-phosphorothioate
  modified_base 21: mod_base = OTHER; note = 2'-O-methyladenosine
cggttgtttccctccttgtta

SEQ ID NO: 327 - RNA, 21 nt, synthetic construct
  source 1..21: mol_type = other RNA
  modified_base 1: mod_base = OTHER; note = 2'-O-methylguanosine-3'-phosphorothioate
  modified_base 2: mod_base = OTHER; note = 2'-O-methyluridine-3'-phosphorothioate
  modified_base 3: mod_base = OTHER; note = 2'-O-methyluridine-3'-phosphate
  modified_base 4: mod_base = OTHER; note = 2'-O-methylguanosine-3'-phosphate
  modified_base 5: mod_base = OTHER; note = 2'-O-methyluridine-3'-phosphate
  modified_base 6: mod_base = OTHER; note = 2'-O-hexadecyl-uridine-3'-phosphate
  modified_base 7: mod_base = OTHER; note = 2'-deoxy-2'-fluorouridine-3'-phosphate
  modified_base 8: mod_base = OTHER; note = 2'-O-methylcytidine-3'-phosphate
  modified_base 9: mod_base = OTHER; note = 2'-deoxy-2'-fluorocytidine-3'-phosphate
  modified_base 10: mod_base = OTHER; note = 2'-deoxy-2'-fluorocytidine-3'-phosphate
  modified_base 11: mod_base = OTHER; note = 2'-deoxy-2'-fluorouridine-3'-phosphate
  modified_base 12: mod_base = OTHER; note = 2'-O-methylcytidine-3'-phosphate
  modified_base 13: mod_base = OTHER; note = 2'-O-methylcytidine-3'-phosphate
  modified_base 14: mod_base = OTHER; note = 2'-O-methyluridine-3'-phosphate
  modified_base 15: mod_base = OTHER; note = 2'-O-methyluridine-3'-phosphate
  modified_base 16: mod_base = OTHER; note = 2'-O-methylguanosine-3'-phosphate
  modified_base 17: mod_base = OTHER; note = 2'-O-methyluridine-3'-phosphate
  modified_base 18: mod_base = OTHER; note = 2'-O-methyluridine-3'-phosphate
  modified_base 19: mod_base = OTHER; note = 2'-O-methyluridine-3'-phosphorothioate
  modified_base 20: mod_base = OTHER; note = 2'-O-methyluridine-3'-phosphorothioate
  modified_base 21: mod_base = OTHER; note = 2'-O-methyladenosine
gttgtttccctccttgtttta

SEQ ID NO: 328 - RNA, 21 nt, synthetic construct
  source 1..21: mol_type = other RNA
  modified_base 1: mod_base = OTHER; note = 2'-O-methyluridine-3'-phosphorothioate
  modified_base 2: mod_base = OTHER; note = 2'-O-methyluridine-3'-phosphorothioate
  modified_base 3: mod_base = OTHER; note = 2'-O-methylguanosine-3'-phosphate
  modified_base 4: mod_base = OTHER; note = 2'-O-methyluridine-3'-phosphate
  modified_base 5: mod_base = OTHER; note = 2'-O-methyluridine-3'-phosphate
  modified_base 6: mod_base = OTHER; note = 2'-O-hexadecyl-uridine-3'-phosphate
  modified_base 7: mod_base = OTHER; note = 2'-deoxy-2'-fluorocytidine-3'-phosphate
  modified_base 8: mod_base = OTHER; note = 2'-O-methylcytidine-3'-phosphate
  modified_base 9: mod_base = OTHER; note = 2'-deoxy-2'-fluorocytidine-3'-phosphate
  modified_base 10: mod_base = OTHER; note = 2'-deoxy-2'-fluorouridine-3'-phosphate
  modified_base 11: mod_base = OTHER; note = 2'-deoxy-2'-fluorocytidine-3'-phosphate
  modified_base 12: mod_base = OTHER; note = 2'-O-methylcytidine-3'-phosphate
  modified_base 13: mod_base = OTHER; note = 2'-O-methyluridine-3'-phosphate
  modified_base 14: mod_base = OTHER; note = 2'-O-methyluridine-3'-phosphate
  modified_base 15: mod_base = OTHER; note = 2'-O-methylguanosine-3'-phosphate
  modified_base 16: mod_base = OTHER; note = 2'-O-methyluridine-3'-phosphate
  modified_base 17: mod_base = OTHER; note = 2'-O-methyluridine-3'-phosphate
  modified_base 18: mod_base = OTHER; note = 2'-O-methyluridine-3'-phosphate
  modified_base 19: mod_base = OTHER; note = 2'-O-methyluridine-3'-phosphorothioate
  modified_base 20: mod_base = OTHER; note = 2'-O-methylcytidine-3'-phosphorothioate
  modified_base 21: mod_base = OTHER; note = 2'-O-methyladenosine
ttgtttccctccttgttttca

SEQ ID NO: 329 - RNA, 21 nt, synthetic construct
  source 1..21: mol_type = other RNA
  modified_base 1: mod_base = OTHER; note = 2'-O-methyluridine-3'-phosphorothioate
  modified_base 2: mod_base = OTHER; note = 2'-O-methyluridine-3'-phosphorothioate
  modified_base 3: mod_base = OTHER; note = 2'-O-methylcytidine-3'-phosphate
  modified_base 4: mod_base = OTHER; note = 2'-O-methylcytidine-3'-phosphate
  modified_base 5: mod_base = OTHER; note = 2'-O-methylcytidine-3'-phosphate
  modified_base 6: mod_base = OTHER; note = 2'-O-hexadecyl-uridine-3'-phosphate
  modified_base 7: mod_base = OTHER; note = 2'-deoxy-2'-fluorocytidine-3'-phosphate
  modified_base 8: mod_base = OTHER; note = 2'-O-methylcytidine-3'-phosphate
  modified_base 9: mod_base = OTHER; note = 2'-deoxy-2'-fluorouridine-3'-phosphate
  modified_base 10: mod_base = OTHER; note = 2'-deoxy-2'-fluorouridine-3'-phosphate
  modified_base 11: mod_base = OTHER; note = 2'-deoxy-2'-fluoroguanosine-3'-phosphate
  modified_base 12: mod_base = OTHER; note = 2'-O-methyluridine-3'-phosphate
  modified_base 13: mod_base = OTHER; note = 2'-O-methyluridine-3'-phosphate
  modified_base 14: mod_base = OTHER; note = 2'-O-methyluridine-3'-phosphate
  modified_base 15: mod_base = OTHER; note = 2'-O-methyluridine-3'-phosphate
  modified_base 16: mod_base = OTHER; note = 2'-O-methylcytidine-3'-phosphate
  modified_base 17: mod_base = OTHER; note = 2'-O-methyluridine-3'-phosphate
  modified_base 18: mod_base = OTHER; note = 2'-O-methyluridine-3'-phosphate
  modified_base 19: mod_base = OTHER; note = 2'-O-methylcytidine-3'-phosphorothioate
  modified_base 20: mod_base = OTHER; note = 2'-O-methyluridine-3'-phosphorothioate
  modified_base 21: mod_base = OTHER; note = 2'-O-methyladenosine
ttccctccttgttttcttcta

SEQ ID NO: 330 - RNA, 21 nt, synthetic construct
  source 1..21: mol_type = other RNA
  modified_base 1: mod_base = OTHER; note = 2'-O-methyluridine-3'-phosphorothioate
  modified_base 2: mod_base = OTHER; note = 2'-O-methylcytidine-3'-phosphorothioate
  modified_base 3: mod_base = OTHER; note = 2'-O-methylcytidine-3'-phosphate
  modified_base 4: mod_base = OTHER; note = 2'-O-methylcytidine-3'-phosphate
  modified_base 5: mod_base = OTHER; note = 2'-O-methyluridine-3'-phosphate
  modified_base 6: mod_base = OTHER; note = 2'-O-hexadecyl-cytidine-3'-phosphate
  modified_base 7: mod_base = OTHER; note = 2'-deoxy-2'-fluorocytidine-3'-phosphate
  modified_base 8: mod_base = OTHER; note = 2'-O-methyluridine-3'-phosphate
  modified_base 9: mod_base = OTHER; note = 2'-deoxy-2'-fluorouridine-3'-phosphate
  modified_base 10: mod_base = OTHER; note = 2'-deoxy-2'-fluoroguanosine-3'-phosphate
  modified_base 11: mod_base = OTHER; note = 2'-deoxy-2'-fluorouridine-3'-phosphate
  modified_base 12: mod_base = OTHER; note = 2'-O-methyluridine-3'-phosphate
  modified_base 13: mod_base = OTHER; note = 2'-O-methyluridine-3'-phosphate
  modified_base 14: mod_base = OTHER; note = 2'-O-methyluridine-3'-phosphate
  modified_base 15: mod_base = OTHER; note = 2'-O-methylcytidine-3'-phosphate
  modified_base 16: mod_base = OTHER; note = 2'-O-methyluridine-3'-phosphate
  modified_base 17: mod_base = OTHER; note = 2'-O-methyluridine-3'-phosphate
  modified_base 18: mod_base = OTHER; note = 2'-O-methylcytidine-3'-phosphate
  modified_base 19: mod_base = OTHER; note = 2'-O-methyluridine-3'-phosphorothioate
  modified_base 20: mod_base = OTHER; note = 2'-O-methylguanosine-3'-phosphorothioate
  modified_base 21: mod_base = OTHER; note = 2'-O-methyladenosine
tccctccttgttttcttctga

SEQ ID NO: 331 - RNA, 21 nt, synthetic construct
  source 1..21: mol_type = other RNA
  modified_base 1: mod_base = OTHER; note = 2'-O-methylcytidine-3'-phosphorothioate
  modified_base 2: mod_base = OTHER; note = 2'-O-methylcytidine-3'-phosphorothioate
  modified_base 3: mod_base = OTHER; note = 2'-O-methylcytidine-3'-phosphate
  modified_base 4: mod_base = OTHER; note = 2'-O-methyluridine-3'-phosphate
  modified_base 5: mod_base = OTHER; note = 2'-O-methylcytidine-3'-phosphate
  modified_base 6: mod_base = OTHER; note = 2'-O-hexadecyl-cytidine-3'-phosphate
  modified_base 7: mod_base = OTHER; note = 2'-deoxy-2'-fluorouridine-3'-phosphate
  modified_base 8: mod_base = OTHER; note = 2'-O-methyluridine-3'-phosphate
  modified_base 9: mod_base = OTHER; note = 2'-deoxy-2'-fluoroguanosine-3'-phosphate
  modified_base 10: mod_base = OTHER; note = 2'-deoxy-2'-fluorouridine-3'-phosphate
  modified_base 11: mod_base = OTHER; note = 2'-deoxy-2'-fluorouridine-3'-phosphate
  modified_base 12: mod_base = OTHER; note = 2'-O-methyluridine-3'-phosphate
  modified_base 13: mod_base = OTHER; note = 2'-O-methyluridine-3'-phosphate
  modified_base 14: mod_base = OTHER; note = 2'-O-methylcytidine-3'-phosphate
  modified_base 15: mod_base = OTHER; note = 2'-O-methyluridine-3'-phosphate
  modified_base 16: mod_base = OTHER; note = 2'-O-methyluridine-3'-phosphate
  modified_base 17: mod_base = OTHER; note = 2'-O-methylcytidine-3'-phosphate
  modified_base 18: mod_base = OTHER; note = 2'-O-methyluridine-3'-phosphate
  modified_base 19: mod_base = OTHER; note = 2'-O-methylguanosine-3'-phosphorothioate
  modified_base 20: mod_base = OTHER; note = 2'-O-methylguanosine-3'-phosphorothioate
  modified_base 21: mod_base = OTHER; note = 2'-O-methyladenosine
ccctccttgttttcttctgga

SEQ ID NO: 332 - RNA, 21 nt, synthetic construct
  source 1..21: mol_type = other RNA
  modified_base 1: mod_base = OTHER; note = 2'-O-methylcytidine-3'-phosphorothioate
  modified_base 2: mod_base = OTHER; note = 2'-O-methylcytidine-3'-phosphorothioate
  modified_base 3: mod_base = OTHER; note = 2'-O-methyluridine-3'-phosphate
  modified_base 4: mod_base = OTHER; note = 2'-O-methylcytidine-3'-phosphate
  modified_base 5: mod_base = OTHER; note = 2'-O-methylcytidine-3'-phosphate
  modified_base 6: mod_base = OTHER; note = 2'-O-hexadecyl-uridine-3'-phosphate
  modified_base 7: mod_base = OTHER; note = 2'-deoxy-2'-fluorouridine-3'-phosphate
  modified_base 8: mod_base = OTHER; note = 2'-O-methylguanosine-3'-phosphate
  modified_base 9: mod_base = OTHER; note = 2'-deoxy-2'-fluorouridine-3'-phosphate
  modified_base 10: mod_base = OTHER; note = 2'-deoxy-2'-fluorouridine-3'-phosphate
  modified_base 11: mod_base = OTHER; note = 2'-deoxy-2'-fluorouridine-3'-phosphate
  modified_base 12: mod_base = OTHER; note = 2'-O-methyluridine-3'-phosphate
  modified_base 13: mod_base = OTHER; note = 2'-O-methylcytidine-3'-phosphate
  modified_base 14: mod_base = OTHER; note = 2'-O-methyluridine-3'-phosphate
  modified_base 15: mod_base = OTHER; note = 2'-O-methyluridine-3'-phosphate
  modified_base 16: mod_base = OTHER; note = 2'-O-methylcytidine-3'-phosphate
  modified_base 17: mod_base = OTHER; note = 2'-O-methyluridine-3'-phosphate
  modified_base 18: mod_base = OTHER; note = 2'-O-methylguanosine-3'-phosphate
  modified_base 19: mod_base = OTHER; note = 2'-O-methylguanosine-3'-phosphorothioate
  modified_base 20: mod_base = OTHER; note = 2'-O-methyluridine-3'-phosphorothioate
  modified_base 21: mod_base = OTHER; note = 2'-O-methyladenosine
cctccttgttttcttctggta

SEQ ID NO: 333 - RNA, 21 nt, synthetic construct
  source 1..21: mol_type = other RNA
  modified_base 1: mod_base = OTHER; note = 2'-O-methylcytidine-3'-phosphorothioate
  modified_base 2: mod_base = OTHER; note = 2'-O-methyluridine-3'-phosphorothioate
  modified_base 3: mod_base = OTHER; note = 2'-O-methylcytidine-3'-phosphate
  modified_base 4: mod_base = OTHER; note = 2'-O-methylcytidine-3'-phosphate
  modified_base 5: mod_base = OTHER; note = 2'-O-methyluridine-3'-phosphate
  modified_base 6: mod_base = OTHER; note = 2'-O-hexadecyl-uridine-3'-phosphate
  modified_base 7: mod_base = OTHER; note = 2'-deoxy-2'-fluoroguanosine-3'-phosphate
  modified_base 8: mod_base = OTHER; note = 2'-O-methyluridine-3'-phosphate
  modified_base 9: mod_base = OTHER; note = 2'-deoxy-2'-fluorouridine-3'-phosphate
  modified_base 10: mod_base = OTHER; note = 2'-deoxy-2'-fluorouridine-3'-phosphate
  modified_base 11: mod_base = OTHER; note = 2'-deoxy-2'-fluorouridine-3'-phosphate
  modified_base 12: mod_base = OTHER; note = 2'-O-methylcytidine-3'-phosphate
  modified_base 13: mod_base = OTHER; note = 2'-O-methyluridine-3'-phosphate
  modified_base 14: mod_base = OTHER; note = 2'-O-methyluridine-3'-phosphate
  modified_base 15: mod_base = OTHER; note = 2'-O-methylcytidine-3'-phosphate
  modified_base 16: mod_base = OTHER; note = 2'-O-methyluridine-3'-phosphate
  modified_base 17: mod_base = OTHER; note = 2'-O-methylguanosine-3'-phosphate
  modified_base 18: mod_base = OTHER; note = 2'-O-methylguanosine-3'-phosphate
  modified_base 19: mod_base = OTHER; note = 2'-O-methyluridine-3'-phosphorothioate
  modified_base 20: mod_base = OTHER; note = 2'-O-methyluridine-3'-phosphorothioate
  modified_base 21: mod_base = OTHER; note = 2'-O-methyladenosine
ctccttgttttcttctggtta

SEQ ID NO: 334 - RNA, 21 nt, synthetic construct
  source 1..21: mol_type = other RNA
  modified_base 1: mod_base = OTHER; note = 2'-O-methylcytidine-3'-phosphorothioate
  modified_base 2: mod_base = OTHER; note = 2'-O-methylcytidine-3'-phosphorothioate
  modified_base 3: mod_base = OTHER; note = 2'-O-methyluridine-3'-phosphate
  modified_base 4: mod_base = OTHER; note = 2'-O-methyluridine-3'-phosphate
  modified_base 5: mod_base = OTHER; note = 2'-O-methylguanosine-3'-phosphate
  modified_base 6: mod_base = OTHER; note = 2'-O-hexadecyl-uridine-3'-phosphate
  modified_base 7: mod_base = OTHER; note = 2'-deoxy-2'-fluorouridine-3'-phosphate
  modified_base 8: mod_base = OTHER; note = 2'-O-methyluridine-3'-phosphate
  modified_base 9: mod_base = OTHER; note = 2'-deoxy-2'-fluorouridine-3'-phosphate
  modified_base 10: mod_base = OTHER; note = 2'-deoxy-2'-fluorocytidine-3'-phosphate
  modified_base 11: mod_base = OTHER; note = 2'-deoxy-2'-fluorouridine-3'-phosphate
  modified_base 12: mod_base = OTHER; note = 2'-O-methyluridine-3'-phosphate
  modified_base 13: mod_base = OTHER; note = 2'-O-methylcytidine-3'-phosphate
  modified_base 14: mod_base = OTHER; note = 2'-O-methyluridine-3'-phosphate
  modified_base 15: mod_base = OTHER; note = 2'-O-methylguanosine-3'-phosphate
  modified_base 16: mod_base = OTHER; note = 2'-O-methylguanosine-3'-phosphate
  modified_base 17: mod_base = OTHER; note = 2'-O-methyluridine-3'-phosphate
  modified_base 18: mod_base = OTHER; note = 2'-O-methyluridine-3'-phosphate
  modified_base 19: mod_base = OTHER; note = 2'-O-methyladenosine-3'-phosphorothioate
  modified_base 20: mod_base = OTHER; note = 2'-O-methyladenosine-3'-phosphorothioate
  modified_base 21: mod_base = OTHER; note = 2'-O-methyladenosine
ccttgttttcttctggttaaa

SEQ ID NO: 335 - RNA, 21 nt, synthetic construct
  source 1..21: mol_type = other RNA
  modified_base 1: mod_base = OTHER; note = 2'-O-methylcytidine-3'-phosphorothioate
  modified_base 2: mod_base = OTHER; note = 2'-O-methyluridine-3'-phosphorothioate
  modified_base 3: mod_base = OTHER; note = 2'-O-methyluridine-3'-phosphate
  modified_base 4: mod_base = OTHER; note = 2'-O-methylguanosine-3'-phosphate
  modified_base 5: mod_base = OTHER; note = 2'-O-methyluridine-3'-phosphate
  modified_base 6: mod_base = OTHER; note = 2'-O-hexadecyl-uridine-3'-phosphate
  modified_base 7: mod_base = OTHER; note = 2'-deoxy-2'-fluorouridine-3'-phosphate
  modified_base 8: mod_base = OTHER; note = 2'-O-methyluridine-3'-phosphate
  modified_base 9: mod_base = OTHER; note = 2'-deoxy-2'-fluorocytidine-3'-phosphate
  modified_base 10: mod_base = OTHER; note = 2'-deoxy-2'-fluorouridine-3'-phosphate
  modified_base 11: mod_base = OTHER; note = 2'-deoxy-2'-fluorouridine-3'-phosphate
  modified_base 12: mod_base = OTHER; note = 2'-O-methylcytidine-3'-phosphate
  modified_base 13: mod_base = OTHER; note = 2'-O-methyluridine-3'-phosphate
  modified_base 14: mod_base = OTHER; note = 2'-O-methylguanosine-3'-phosphate
  modified_base 15: mod_base = OTHER; note = 2'-O-methylguanosine-3'-phosphate
  modified_base 16: mod_base = OTHER; note = 2'-O-methyluridine-3'-phosphate
  modified_base 17: mod_base = OTHER; note = 2'-O-methyluridine-3'-phosphate
  modified_base 18: mod_base = OTHER; note = 2'-O-methyladenosine-3'-phosphate
  modified_base 19: mod_base = OTHER; note = 2'-O-methyladenosine-3'-phosphorothioate
  modified_base 20: mod_base = OTHER; note = 2'-O-methyluridine-3'-phosphorothioate
  modified_base 21: mod_base = OTHER; note = 2'-O-methyladenosine
cttgttttcttctggttaata

SEQ ID NO: 336 - RNA, 21 nt, synthetic construct
  source 1..21: mol_type = other RNA
  modified_base 1: mod_base = OTHER; note = 2'-O-methyluridine-3'-phosphorothioate
  modified_base 2: mod_base = OTHER; note = 2'-O-methyluridine-3'-phosphorothioate
  modified_base 3: mod_base = OTHER; note = 2'-O-methylguanosine-3'-phosphate
  modified_base 4: mod_base = OTHER; note = 2'-O-methyluridine-3'-phosphate
  modified_base 5: mod_base = OTHER; note = 2'-O-methyluridine-3'-phosphate
  modified_base 6: mod_base = OTHER; note = 2'-O-hexadecyl-uridine-3'-phosphate
  modified_base 7: mod_base = OTHER; note = 2'-deoxy-2'-fluorouridine-3'-phosphate
  modified_base 8: mod_base = OTHER; note = 2'-O-methylcytidine-3'-phosphate
  modified_base 9: mod_base = OTHER; note = 2'-deoxy-2'-fluorouridine-3'-phosphate
  modified_base 10: mod_base = OTHER; note = 2'-deoxy-2'-fluorouridine-3'-phosphate
  modified_base 11: mod_base = OTHER; note = 2'-deoxy-2'-fluorocytidine-3'-phosphate
  modified_base 12: mod_base = OTHER; note = 2'-O-methyluridine-3'-phosphate
  modified_base 13: mod_base = OTHER; note = 2'-O-methylguanosine-3'-phosphate
  modified_base 14: mod_base = OTHER; note = 2'-O-methylguanosine-3'-phosphate
  modified_base 15: mod_base = OTHER; note = 2'-O-methyluridine-3'-phosphate
  modified_base 16: mod_base = OTHER; note = 2'-O-methyluridine-3'-phosphate
  modified_base 17: mod_base = OTHER; note = 2'-O-methyladenosine-3'-phosphate
  modified_base 18: mod_base = OTHER; note = 2'-O-methyladenosine-3'-phosphate
  modified_base 19: mod_base = OTHER; note = 2'-O-methyluridine-3'-phosphorothioate
  modified_base 20: mod_base = OTHER; note = 2'-O-methylcytidine-3'-phosphorothioate
  modified_base 21: mod_base = OTHER; note = 2'-O-methyladenosine
ttgttttcttctggttaatca

SEQ ID NO: 337 - RNA, 21 nt, synthetic construct
  source 1..21: mol_type = other RNA
  modified_base 1: mod_base = OTHER; note = 2'-O-methyluridine-3'-phosphorothioate
  modified_base 2: mod_base = OTHER; note = 2'-O-methylguanosine-3'-phosphorothioate
  modified_base 3: mod_base = OTHER; note = 2'-O-methyluridine-3'-phosphate
  modified_base 4: mod_base = OTHER; note = 2'-O-methyluridine-3'-phosphate
  modified_base 5: mod_base = OTHER; note = 2'-O-methyluridine-3'-phosphate
  modified_base 6: mod_base = OTHER; note = 2'-O-hexadecyl-uridine-3'-phosphate
  modified_base 7: mod_base = OTHER; note = 2'-deoxy-2'-fluorocytidine-3'-phosphate
  modified_base 8: mod_base = OTHER; note = 2'-O-methyluridine-3'-phosphate
  modified_base 9: mod_base = OTHER; note = 2'-deoxy-2'-fluorouridine-3'-phosphate
  modified_base 10: mod_base = OTHER; note = 2'-deoxy-2'-fluorocytidine-3'-phosphate
  modified_base 11: mod_base = OTHER; note = 2'-deoxy-2'-fluorouridine-3'-phosphate
  modified_base 12: mod_base = OTHER; note = 2'-O-methylguanosine-3'-phosphate
  modified_base 13: mod_base = OTHER; note = 2'-O-methylguanosine-3'-phosphate
  modified_base 14: mod_base = OTHER; note = 2'-O-methyluridine-3'-phosphate
  modified_base 15: mod_base = OTHER; note = 2'-O-methyluridine-3'-phosphate
  modified_base 16: mod_base = OTHER; note = 2'-O-methyladenosine-3'-phosphate
  modified_base 17: mod_base = OTHER; note = 2'-O-methyladenosine-3'-phosphate
  modified_base 18: mod_base = OTHER; note = 2'-O-methyluridine-3'-phosphate
  modified_base 19: mod_base = OTHER; note = 2'-O-methylcytidine-3'-phosphorothioate
  modified_base 20: mod_base = OTHER; note = 2'-O-methyluridine-3'-phosphorothioate
  modified_base 21: mod_base = OTHER; note = 2'-O-methyladenosine
tgttttcttctggttaatcta

SEQ ID NO: 338 - RNA, 21 nt, synthetic construct
  source 1..21: mol_type = other RNA
  modified_base 1: mod_base = OTHER; note = 2'-O-methylguanosine-3'-phosphorothioate
  modified_base 2: mod_base = OTHER; note = 2'-O-methyluridine-3'-phosphorothioate
  modified_base 3: mod_base = OTHER; note = 2'-O-methyluridine-3'-phosphate
  modified_base 4: mod_base = OTHER; note = 2'-O-methyluridine-3'-phosphate
  modified_base 5: mod_base = OTHER; note = 2'-O-methyluridine-3'-phosphate
  modified_base 6: mod_base = OTHER; note = 2'-O-hexadecyl-cytidine-3'-phosphate
  modified_base 7: mod_base = OTHER; note = 2'-deoxy-2'-fluorouridine-3'-phosphate
  modified_base 8: mod_base = OTHER; note = 2'-O-methyluridine-3'-phosphate
  modified_base 9: mod_base = OTHER; note = 2'-deoxy-2'-fluorocytidine-3'-phosphate
  modified_base 10: mod_base = OTHER; note = 2'-deoxy-2'-fluorouridine-3'-phosphate
  modified_base 11: mod_base = OTHER; note = 2'-deoxy-2'-fluoroguanosine-3'-phosphate
  modified_base 12: mod_base = OTHER; note = 2'-O-methylguanosine-3'-phosphate
  modified_base 13: mod_base = OTHER; note = 2'-O-methyluridine-3'-phosphate
  modified_base 14: mod_base = OTHER; note = 2'-O-methyluridine-3'-phosphate
  modified_base 15: mod_base = OTHER; note = 2'-O-methyladenosine-3'-phosphate
  modified_base 16: mod_base = OTHER; note = 2'-O-methyladenosine-3'-phosphate
  modified_base 17: mod_base = OTHER; note = 2'-O-methyluridine-3'-phosphate
  modified_base 18: mod_base = OTHER; note = 2'-O-methylcytidine-3'-phosphate
  modified_base 19: mod_base = OTHER; note = 2'-O-methyluridine-3'-phosphorothioate
  modified_base 20: mod_base = OTHER; note = 2'-O-methyluridine-3'-phosphorothioate
  modified_base 21: mod_base = OTHER; note = 2'-O-methyladenosine
gttttcttctggttaatctta

SEQ ID NO: 339 - RNA, 21 nt, synthetic construct
  source 1..21: mol_type = other RNA
  modified_base 1: mod_base = OTHER; note = 2'-O-methyluridine-3'-phosphorothioate
  modified_base 2: mod_base = OTHER; note = 2'-O-methyluridine-3'-phosphorothioate
  modified_base 3: mod_base = OTHER; note = 2'-O-methylcytidine-3'-phosphate
  modified_base 4: mod_base = OTHER; note = 2'-O-methyluridine-3'-phosphate
  modified_base 5: mod_base = OTHER; note = 2'-O-methyluridine-3'-phosphate
  modified_base 6: mod_base = OTHER; note = 2'-O-hexadecyl-cytidine-3'-phosphate
  modified_base 7: mod_base = OTHER; note = 2'-deoxy-2'-fluorouridine-3'-phosphate
  modified_base 8: mod_base = OTHER; note = 2'-O-methylguanosine-3'-phosphate
  modified_base 9: mod_base = OTHER; note = 2'-deoxy-2'-fluoroguanosine-3'-phosphate
  modified_base 10: mod_base = OTHER; note = 2'-deoxy-2'-fluorouridine-3'-phosphate
  modified_base 11: mod_base = OTHER; note = 2'-deoxy-2'-fluorouridine-3'-phosphate
  modified_base 12: mod_base = OTHER; note = 2'-O-methyladenosine-3'-phosphate
  modified_base 13: mod_base = OTHER; note = 2'-O-methyladenosine-3'-phosphate
  modified_base 14: mod_base = OTHER; note = 2'-O-methyluridine-3'-phosphate
  modified_base 15: mod_base = OTHER; note = 2'-O-methylcytidine-3'-phosphate
  modified_base 16: mod_base = OTHER; note = 2'-O-methyluridine-3'-phosphate
  modified_base 17: mod_base = OTHER; note = 2'-O-methyluridine-3'-phosphate
  modified_base 18: mod_base = OTHER; note = 2'-O-methyluridine-3'-phosphate
  modified_base 19: mod_base = OTHER; note = 2'-O-methyladenosine-3'-phosphorothioate
  modified_base 20: mod_base = OTHER; note = 2'-O-methyluridine-3'-phosphorothioate
  modified_base 21: mod_base = OTHER; note = 2'-O-methyladenosine
ttcttctggttaatctttata

SEQ ID NO: 340 - RNA, 21 nt, synthetic construct
  source 1..21: mol_type = other RNA
  modified_base 1: mod_base = OTHER; note = 2'-O-methyluridine-3'-phosphorothioate
  modified_base 2: mod_base = OTHER; note = 2'-O-methylcytidine-3'-phosphorothioate
  modified_base 3: mod_base = OTHER; note = 2'-O-methyluridine-3'-phosphate
  modified_base 4: mod_base = OTHER; note = 2'-O-methyluridine-3'-phosphate
  modified_base 5: mod_base = OTHER; note = 2'-O-methylcytidine-3'-phosphate
  modified_base 6: mod_base = OTHER; note = 2'-O-hexadecyl-uridine-3'-phosphate
  modified_base 7: mod_base = OTHER; note = 2'-deoxy-2'-fluoroguanosine-3'-phosphate
  modified_base 8: mod_base = OTHER; note = 2'-O-methylguanosine-3'-phosphate
  modified_base 9: mod_base = OTHER; note = 2'-deoxy-2'-fluorouridine-3'-phosphate
  modified_base 10: mod_base = OTHER; note = 2'-deoxy-2'-fluorouridine-3'-phosphate
  modified_base 11: mod_base = OTHER; note = 2'-deoxy-2'-fluoroadenosine-3'-phosphate
  modified_base 12: mod_base = OTHER; note = 2'-O-methyladenosine-3'-phosphate
  modified_base 13: mod_base = OTHER; note = 2'-O-methyluridine-3'-phosphate
  modified_base 14: mod_base = OTHER; note = 2'-O-methylcytidine-3'-phosphate
  modified_base 15: mod_base = OTHER; note = 2'-O-methyluridine-3'-phosphate
  modified_base 16: mod_base = OTHER; note = 2'-O-methyluridine-3'-phosphate
  modified_base 17: mod_base = OTHER; note = 2'-O-methyluridine-3'-phosphate
  modified_base 18: mod_base = OTHER; note = 2'-O-methyladenosine-3'-phosphate
  modified_base 19: mod_base = OTHER; note = 2'-O-methyluridine-3'-phosphorothioate
  modified_base 20: mod_base = OTHER; note = 2'-O-methylcytidine-3'-phosphorothioate
  modified_base 21: mod_base = OTHER; note = 2'-O-methyladenosine
tcttctggttaatctttatca

SEQ ID NO: 341 - RNA, 21 nt, synthetic construct
  source 1..21: mol_type = other RNA
  modified_base 1: mod_base = OTHER; note = 2'-O-methylcytidine-3'-phosphorothioate
  modified_base 2: mod_base = OTHER; note = 2'-O-methyluridine-3'-phosphorothioate
  modified_base 3: mod_base = OTHER; note = 2'-O-methyluridine-3'-phosphate
  modified_base 4: mod_base = OTHER; note = 2'-O-methylcytidine-3'-phosphate
  modified_base 5: mod_base = OTHER; note = 2'-O-methyluridine-3'-phosphate
  modified_base 6: mod_base = OTHER; note = 2'-O-hexadecyl-guanosine-3'-phosphate
  modified_base 7: mod_base = OTHER; note = 2'-deoxy-2'-fluoroguanosine-3'-phosphate
  modified_base 8: mod_base = OTHER; note = 2'-O-methyluridine-3'-phosphate
  modified_base 9: mod_base = OTHER; note = 2'-deoxy-2'-fluorouridine-3'-phosphate
  modified_base 10: mod_base = OTHER; note = 2'-deoxy-2'-fluoroadenosine-3'-phosphate
  modified_base 11: mod_base = OTHER; note = 2'-deoxy-2'-fluoroadenosine-3'-phosphate
  modified_base 12: mod_base = OTHER; note = 2'-O-methyluridine-3'-phosphate
  modified_base 13: mod_base = OTHER; note = 2'-O-methylcytidine-3'-phosphate
  modified_base 14: mod_base = OTHER; note = 2'-O-methyluridine-3'-phosphate
  modified_base 15: mod_base = OTHER; note = 2'-O-methyluridine-3'-phosphate
  modified_base 16: mod_base = OTHER; note = 2'-O-methyluridine-3'-phosphate
  modified_base 17: mod_base = OTHER; note = 2'-O-methyladenosine-3'-phosphate
  modified_base 18: mod_base = OTHER; note = 2'-O-methyluridine-3'-phosphate
  modified_base 19: mod_base = OTHER; note = 2'-O-methylcytidine-3'-phosphorothioate
  modified_base 20: mod_base = OTHER; note = 2'-O-methyladenosine-3'-phosphorothioate
  modified_base 21: mod_base = OTHER; note = 2'-O-methyladenosine
cttctggttaatctttatcaa

SEQ ID NO: 342 - RNA, 21 nt, synthetic construct
  source 1..21: mol_type = other RNA
  modified_base 1: mod_base = OTHER; note = 2'-O-methyluridine-3'-phosphorothioate
  modified_base 2: mod_base = OTHER; note = 2'-O-methyluridine-3'-phosphorothioate
  modified_base 3: mod_base = OTHER; note = 2'-O-methylcytidine-3'-phosphate
  modified_base 4: mod_base = OTHER; note = 2'-O-methyluridine-3'-phosphate
  modified_base 5: mod_base = OTHER; note = 2'-O-methylguanosine-3'-phosphate
  modified_base 6: mod_base = OTHER; note = 2'-O-hexadecyl-guanosine-3'-phosphate
  modified_base 7: mod_base = OTHER; note = 2'-deoxy-2'-fluorouridine-3'-phosphate
  modified_base 8: mod_base = OTHER; note = 2'-O-methyluridine-3'-phosphate
  modified_base 9: mod_base = OTHER; note = 2'-deoxy-2'-fluoroadenosine-3'-phosphate
  modified_base 10: mod_base = OTHER; note = 2'-deoxy-2'-fluoroadenosine-3'-phosphate
  modified_base 11: mod_base = OTHER; note = 2'-deoxy-2'-fluorouridine-3'-phosphate
  modified_base 12: mod_base = OTHER; note = 2'-O-methylcytidine-3'-phosphate
  modified_base 13: mod_base = OTHER; note = 2'-O-methyluridine-3'-phosphate
  modified_base 14: mod_base = OTHER; note = 2'-O-methyluridine-3'-phosphate
  modified_base 15: mod_base = OTHER; note = 2'-O-methyluridine-3'-phosphate
  modified_base 16: mod_base = OTHER; note = 2'-O-methyladenosine-3'-phosphate
  modified_base 17: mod_base = OTHER; note = 2'-O-methyluridine-3'-phosphate
  modified_base 18: mod_base = OTHER; note = 2'-O-methylcytidine-3'-phosphate
  modified_base 19: mod_base = OTHER; note = 2'-O-methyladenosine-3'-phosphorothioate
  modified_base 20: mod_base = OTHER; note = 2'-O-methylguanosine-3'-phosphorothioate
  modified_base 21: mod_base = OTHER; note = 2'-O-methyladenosine
ttctggttaatctttatcaga

SEQ ID NO: 343 - RNA, 21 nt, synthetic construct
  source 1..21: mol_type = other RNA
  modified_base 1: mod_base = OTHER; note = 2'-O-methyluridine-3'-phosphorothioate
  modified_base 2: mod_base = OTHER; note = 2'-O-methylcytidine-3'-phosphorothioate
  modified_base 3: mod_base = OTHER; note = 2'-O-methyluridine-3'-phosphate
  modified_base 4: mod_base = OTHER; note = 2'-O-methylguanosine-3'-phosphate
  modified_base 5: mod_base = OTHER; note = 2'-O-methylguanosine-3'-phosphate
  modified_base 6: mod_base = OTHER; note = 2'-O-hexadecyl-uridine-3'-phosphate
  modified_base 7: mod_base = OTHER; note = 2'-deoxy-2'-fluorouridine-3'-phosphate
  modified_base 8: mod_base = OTHER; note = 2'-O-methyladenosine-3'-phosphate
  modified_base 9: mod_base = OTHER; note = 2'-deoxy-2'-fluoroadenosine-3'-phosphate
  modified_base 10: mod_base = OTHER; note = 2'-deoxy-2'-fluorouridine-3'-phosphate
  modified_base 11: mod_base = OTHER; note = 2'-deoxy-2'-fluorocytidine-3'-phosphate
  modified_base 12: mod_base = OTHER; note = 2'-O-methyluridine-3'-phosphate
  modified_base 13: mod_base = OTHER; note = 2'-O-methyluridine-3'-phosphate
  modified_base 14: mod_base = OTHER; note = 2'-O-methyluridine-3'-phosphate
  modified_base 15: mod_base = OTHER; note = 2'-O-methyladenosine-3'-phosphate
  modified_base 16: mod_base = OTHER; note = 2'-O-methyluridine-3'-phosphate
  modified_base 17: mod_base = OTHER; note = 2'-O-methylcytidine-3'-phosphate
  modified_base 18: mod_base = OTHER; note = 2'-O-methyladenosine-3'-phosphate
  modified_base 19: mod_base = OTHER; note = 2'-O-methylguanosine-3'-phosphorothioate
  modified_base 20: mod_base = OTHER; note = 2'-O-methylguanosine-3'-phosphorothioate
  modified_base 21: mod_base = OTHER; note = 2'-O-methyladenosine
tctggttaatctttatcagga

SEQ ID NO: 344 - RNA, 21 nt, synthetic construct
  source 1..21: mol_type = other RNA
  modified_base 1: mod_base = OTHER; note = 2'-O-methylcytidine-3'-phosphorothioate
  modified_base 2: mod_base = OTHER; note = 2'-O-methyluridine-3'-phosphorothioate
  modified_base 3: mod_base = OTHER; note = 2'-O-methylguanosine-3'-phosphate
  modified_base 4: mod_base = OTHER; note = 2'-O-methylguanosine-3'-phosphate
  modified_base 5: mod_base = OTHER; note = 2'-O-methyluridine-3'-phosphate
  modified_base 6: mod_base = OTHER; note = 2'-O-hexadecyl-uridine-3'-phosphate
  modified_base 7: mod_base = OTHER; note = 2'-deoxy-2'-fluoroadenosine-3'-phosphate
  modified_base 8: mod_base = OTHER; note = 2'-O-methyladenosine-3'-phosphate
  modified_base 9: mod_base = OTHER; note = 2'-deoxy-2'-fluorouridine-3'-phosphate
  modified_base 10: mod_base = OTHER; note = 2'-deoxy-2'-fluorocytidine-3'-phosphate
  modified_base 11: mod_base = OTHER; note = 2'-deoxy-2'-fluorouridine-3'-phosphate
  modified_base 12: mod_base = OTHER; note = 2'-O-methyluridine-3'-phosphate
  modified_base 13: mod_base = OTHER; note = 2'-O-methyluridine-3'-phosphate
  modified_base 14: mod_base = OTHER; note = 2'-O-methyladenosine-3'-phosphate
  modified_base 15: mod_base = OTHER; note = 2'-O-methyluridine-3'-phosphate
  modified_base 16: mod_base = OTHER; note = 2'-O-methylcytidine-3'-phosphate
  modified_base 17: mod_base = OTHER; note = 2'-O-methyladenosine-3'-phosphate
  modified_base 18: mod_base = OTHER; note = 2'-O-methylguanosine-3'-phosphate
  modified_base 19: mod_base = OTHER; note = 2'-O-methylguanosine-3'-phosphorothioate
  modified_base 20: mod_base = OTHER; note = 2'-O-methyluridine-3'-phosphorothioate
  modified_base 21: mod_base = OTHER; note = 2'-O-methyladenosine
ctggttaatctttatcaggta

SEQ ID NO: 345 - RNA, 21 nt, synthetic construct
  source 1..21: mol_type = other RNA
  modified_base 1: mod_base = OTHER; note = 2'-O-methyluridine-3'-phosphorothioate
  modified_base 2: mod_base = OTHER; note = 2'-O-methylguanosine-3'-phosphorothioate
  modified_base 3: mod_base = OTHER; note = 2'-O-methylguanosine-3'-phosphate
  modified_base 4: mod_base = OTHER; note = 2'-O-methyluridine-3'-phosphate
  modified_base 5: mod_base = OTHER; note = 2'-O-methyluridine-3'-phosphate
  modified_base 6: mod_base = OTHER; note = 2'-O-hexadecyl-adenosine-3'-phosphate
  modified_base 7: mod_base = OTHER; note = 2'-deoxy-2'-fluoroadenosine-3'-phosphate
  modified_base 8: mod_base = OTHER; note = 2'-O-methyluridine-3'-phosphate
  modified_base 9: mod_base = OTHER; note = 2'-deoxy-2'-fluorocytidine-3'-phosphate
  modified_base 10: mod_base = OTHER; note = 2'-deoxy-2'-fluorouridine-3'-phosphate
  modified_base 11: mod_base = OTHER; note = 2'-deoxy-2'-fluorouridine-3'-phosphate
  modified_base 12: mod_base = OTHER; note = 2'-O-methyluridine-3'-phosphate
  modified_base 13: mod_base = OTHER; note = 2'-O-methyladenosine-3'-phosphate
  modified_base 14: mod_base = OTHER; note = 2'-O-methyluridine-3'-phosphate
  modified_base 15: mod_base = OTHER; note = 2'-O-methylcytidine-3'-phosphate
  modified_base 16: mod_base = OTHER; note = 2'-O-methyladenosine-3'-phosphate
  modified_base 17: mod_base = OTHER; note = 2'-O-methylguanosine-3'-phosphate
  modified_base 18: mod_base = OTHER; note = 2'-O-methylguanosine-3'-phosphate
  modified_base 19: mod_base = OTHER; note = 2'-O-methyluridine-3'-phosphorothioate
  modified_base 20: mod_base = OTHER; note = 2'-O-methylcytidine-3'-phosphorothioate
  modified_base 21: mod_base = OTHER; note = 2'-O-methyladenosine
tggttaatctttatcaggtca

SEQ ID NO: 346 - RNA, 21 nt, synthetic construct
  source 1..21: mol_type = other RNA
  modified_base 1: mod_base = OTHER; note = 2'-O-methylguanosine-3'-phosphorothioate
  modified_base 2: mod_base = OTHER; note = 2'-O-methyluridine-3'-phosphorothioate
  modified_base 3: mod_base = OTHER; note = 2'-O-methyluridine-3'-phosphate
  modified_base 4: mod_base = OTHER; note = 2'-O-methyladenosine-3'-phosphate
  modified_base 5: mod_base = OTHER; note = 2'-O-methyladenosine-3'-phosphate
  modified_base 6: mod_base = OTHER; note = 2'-O-hexadecyl-uridine-3'-phosphate
  modified_base 7: mod_base = OTHER; note = 2'-deoxy-2'-fluorocytidine-3'-phosphate
  modified_base 8: mod_base = OTHER; note = 2'-O-methyluridine-3'-phosphate
  modified_base 9: mod_base = OTHER; note = 2'-deoxy-2'-fluorouridine-3'-phosphate
  modified_base 10: mod_base = OTHER; note = 2'-deoxy-2'-fluorouridine-3'-phosphate
  modified_base 11: mod_base = OTHER; note = 2'-deoxy-2'-fluoroadenosine-3'-phosphate
  modified_base 12: mod_base = OTHER; note = 2'-O-methyluridine-3'-phosphate
  modified_base 13: mod_base = OTHER; note = 2'-O-methylcytidine-3'-phosphate
  modified_base 14: mod_base = OTHER; note = 2'-O-methyladenosine-3'-phosphate
  modified_base 15: mod_base = OTHER; note = 2'-O-methylguanosine-3'-phosphate
  modified_base 16: mod_base = OTHER; note = 2'-O-methylguanosine-3'-phosphate
  modified_base 17: mod_base = OTHER; note = 2'-O-methyluridine-3'-phosphate
  modified_base 18: mod_base = OTHER; note = 2'-O-methylcytidine-3'-phosphate
  modified_base 19: mod_base = OTHER; note = 2'-O-methyluridine-3'-phosphorothioate
  modified_base 20: mod_base = OTHER; note = 2'-O-methyluridine-3'-phosphorothioate
  modified_base 21: mod_base = OTHER; note = 2'-O-methyladenosine
gttaatctttatcaggtctta

SEQ ID NO: 347 - RNA, 21 nt, synthetic construct
  source 1..21: mol_type = other RNA
  modified_base 1: mod_base = OTHER; note = 2'-O-methyluridine-3'-phosphorothioate
  modified_base 2: mod_base = OTHER; note = 2'-O-methyluridine-3'-phosphorothioate
  modified_base 3: mod_base = OTHER; note = 2'-O-methyladenosine-3'-phosphate
  modified_base 4: mod_base = OTHER; note = 2'-O-methyladenosine-3'-phosphate
  modified_base 5: mod_base = OTHER; note = 2'-O-methyluridine-3'-phosphate
  modified_base 6: mod_base = OTHER; note = 2'-O-hexadecyl-cytidine-3'-phosphate
  modified_base 7: mod_base = OTHER; note = 2'-deoxy-2'-fluorouridine-3'-phosphate
  modified_base 8: mod_base = OTHER; note = 2'-O-methyluridine-3'-phosphate
  modified_base 9: mod_base = OTHER; note = 2'-deoxy-2'-fluorouridine-3'-phosphate
  modified_base 10: mod_base = OTHER; note = 2'-deoxy-2'-fluoroadenosine-3'-phosphate
  modified_base 11: mod_base = OTHER; note = 2'-deoxy-2'-fluorouridine-3'-phosphate
  modified_base 12: mod_base = OTHER; note = 2'-O-methylcytidine-3'-phosphate
  modified_base 13: mod_base = OTHER; note = 2'-O-methyladenosine-3'-phosphate
  modified_base 14: mod_base = OTHER; note = 2'-O-methylguanosine-3'-phosphate
  modified_base 15: mod_base = OTHER; note = 2'-O-methylguanosine-3'-phosphate
  modified_base 16: mod_base = OTHER; note = 2'-O-methyluridine-3'-phosphate
  modified_base 17: mod_base = OTHER; note = 2'-O-methylcytidine-3'-phosphate
  modified_base 18: mod_base = OTHER; note = 2'-O-methyluridine-3'-phosphate
  modified_base 19: mod_base = OTHER; note = 2'-O-methyluridine-3'-phosphorothioate
  modified_base 20: mod_base = OTHER; note = 2'-O-methyluridine-3'-phosphorothioate
  modified_base 21: mod_base = OTHER; note = 2'-O-methyladenosine
ttaatctttatcaggtcttta

SEQ ID NO: 348 - RNA, 21 nt, synthetic construct
  source 1..21: mol_type = other RNA
  modified_base 1: mod_base = OTHER; note = 2'-O-methyladenosine-3'-phosphorothioate
  modified_base 2: mod_base = OTHER; note = 2'-O-methyladenosine-3'-phosphorothioate
  modified_base 3: mod_base = OTHER; note = 2'-O-methyluridine-3'-phosphate
  modified_base 4: mod_base = OTHER; note = 2'-O-methylcytidine-3'-phosphate
  modified_base 5: mod_base = OTHER; note = 2'-O-methyluridine-3'-phosphate
  modified_base 6: mod_base = OTHER; note = 2'-O-hexadecyl-uridine-3'-phosphate
  modified_base 7: mod_base = OTHER; note = 2'-deoxy-2'-fluorouridine-3'-phosphate
  modified_base 8: mod_base = OTHER; note = 2'-O-methyladenosine-3'-phosphate
  modified_base 9: mod_base = OTHER; note = 2'-deoxy-2'-fluorouridine-3'-phosphate
  modified_base 10: mod_base = OTHER; note = 2'-deoxy-2'-fluorocytidine-3'-phosphate
  modified_base 11: mod_base = OTHER; note = 2'-deoxy-2'-fluoroadenosine-3'-phosphate
  modified_base 12: mod_base = OTHER; note = 2'-O-methylguanosine-3'-phosphate
  modified_base 13: mod_base = OTHER; note = 2'-O-methylguanosine-3'-phosphate
  modified_base 14: mod_base = OTHER; note = 2'-O-methyluridine-3'-phosphate
  modified_base 15: mod_base = OTHER; note = 2'-O-methylcytidine-3'-phosphate
  modified_base 16: mod_base = OTHER; note = 2'-O-methyluridine-3'-phosphate
  modified_base 17: mod_base = OTHER; note = 2'-O-methyluridine-3'-phosphate
  modified_base 18: mod_base = OTHER; note = 2'-O-methyluridine-3'-phosphate
  modified_base 19: mod_base = OTHER; note = 2'-O-methyluridine-3'-phosphorothioate
  modified_base 20: mod_base = OTHER; note = 2'-O-methylcytidine-3'-phosphorothioate
  modified_base 21: mod_base = OTHER; note = 2'-O-methyladenosine
aatctttatcaggtcttttca

SEQ ID NO: 349 - RNA, 21 nt, synthetic construct
  source 1..21: mol_type = other RNA
  modified_base 1: mod_base = OTHER; note = 2'-O-methyladenosine-3'-phosphorothioate
  modified_base 2: mod_base = OTHER; note = 2'-O-methyluridine-3'-phosphorothioate
  modified_base 3: mod_base = OTHER; note = 2'-O-methylcytidine-3'-phosphate
  modified_base 4: mod_base = OTHER; note = 2'-O-methyluridine-3'-phosphate
  modified_base 5: mod_base = OTHER; note = 2'-O-methyluridine-3'-phosphate
  modified_base 6: mod_base = OTHER; note = 2'-O-hexadecyl-uridine-3'-phosphate
  modified_base 7: mod_base = OTHER; note = 2'-deoxy-2'-fluoroadenosine-3'-phosphate
  modified_base 8: mod_base = OTHER; note = 2'-O-methyluridine-3'-phosphate
  modified_base 9: mod_base = OTHER; note = 2'-deoxy-2'-fluorocytidine-3'-phosphate
  modified_base 10: mod_base = OTHER; note = 2'-deoxy-2'-fluoroadenosine-3'-phosphate
  modified_base 11: mod_base = OTHER; note = 2'-deoxy-2'-fluoroguanosine-3'-phosphate
  modified_base 12: mod_base = OTHER; note = 2'-O-methylguanosine-3'-phosphate
  modified_base 13: mod_base = OTHER; note = 2'-O-methyluridine-3'-phosphate
  modified_base 14: mod_base = OTHER; note = 2'-O-methylcytidine-3'-phosphate
  modified_base 15: mod_base = OTHER; note = 2'-O-methyluridine-3'-phosphate
  modified_base 16: mod_base = OTHER; note = 2'-O-methyluridine-3'-phosphate
  modified_base 17: mod_base = OTHER; note = 2'-O-methyluridine-3'-phosphate
  modified_base 18: mod_base = OTHER; note = 2'-O-methyluridine-3'-phosphate
  modified_base 19: mod_base = OTHER; note = 2'-O-methylcytidine-3'-phosphorothioate
  modified_base 20: mod_base = OTHER; note = 2'-O-methyluridine-3'-phosphorothioate
  modified_base 21: mod_base = OTHER; note = 2'-O-methyladenosine
atctttatcaggtcttttcta

SEQ ID NO: 350 - RNA, 21 nt, synthetic construct
  source 1..21: mol_type = other RNA
  modified_base 1: mod_base = OTHER; note = 2'-O-methyluridine-3'-phosphorothioate
  modified_base 2: mod_base = OTHER; note = 2'-O-methylcytidine-3'-phosphorothioate
  modified_base 3: mod_base = OTHER; note = 2'-O-methyluridine-3'-phosphate
  modified_base 4: mod_base = OTHER; note = 2'-O-methyluridine-3'-phosphate
  modified_base 5: mod_base = OTHER; note = 2'-O-methyluridine-3'-phosphate
  modified_base 6: mod_base = OTHER; note = 2'-O-hexadecyl-adenosine-3'-phosphate
  modified_base 7: mod_base = OTHER; note = 2'-deoxy-2'-fluorouridine-3'-phosphate
  modified_base 8: mod_base = OTHER; note = 2'-O-methylcytidine-3'-phosphate
  modified_base 9: mod_base = OTHER; note = 2'-deoxy-2'-fluoroadenosine-3'-phosphate
  modified_base 10: mod_base = OTHER; note = 2'-deoxy-2'-fluoroguanosine-3'-phosphate
  modified_base 11: mod_base = OTHER; note = 2'-deoxy-2'-fluoroguanosine-3'-phosphate
  modified_base 12: mod_base = OTHER; note = 2'-O-methyluridine-3'-phosphate
  modified_base 13: mod_base = OTHER; note = 2'-O-methylcytidine-3'-phosphate
  modified_base 14: mod_base = OTHER; note = 2'-O-methyluridine-3'-phosphate
  modified_base 15: mod_base = OTHER; note = 2'-O-methyluridine-3'-phosphate
  modified_base 16: mod_base = OTHER; note = 2'-O-methyluridine-3'-phosphate
  modified_base 17: mod_base = OTHER; note = 2'-O-methyluridine-3'-phosphate
  modified_base 18: mod_base = OTHER; note = 2'-O-methylcytidine-3'-phosphate
  modified_base 19: mod_base = OTHER; note = 2'-O-methyluridine-3'-phosphorothioate
  modified_base 20: mod_base = OTHER; note = 2'-O-methyluridine-3'-phosphorothioate
  modified_base 21: mod_base = OTHER; note = 2'-O-methyladenosine
tctttatcaggtcttttctta

SEQ ID NO: 351 - RNA, 21 nt, synthetic construct
  source 1..21: mol_type = other RNA
  modified_base 1: mod_base = OTHER; note = 2'-O-methylcytidine-3'-phosphorothioate
  modified_base 2: mod_base = OTHER; note = 2'-O-methyluridine-3'-phosphorothioate
  modified_base 3: mod_base = OTHER; note = 2'-O-methyluridine-3'-phosphate
  modified_base 4: mod_base = OTHER; note = 2'-O-methyluridine-3'-phosphate
  modified_base 5: mod_base = OTHER; note = 2'-O-methyladenosine-3'-phosphate
  modified_base 6: mod_base = OTHER; note = 2'-O-hexadecyl-uridine-3'-phosphate
  modified_base 7: mod_base = OTHER; note = 2'-deoxy-2'-fluorocytidine-3'-phosphate
  modified_base 8: mod_base = OTHER; note = 2'-O-methyladenosine-3'-phosphate
  modified_base 9: mod_base = OTHER; note = 2'-deoxy-2'-fluoroguanosine-3'-phosphate
  modified_base 10: mod_base = OTHER; note = 2'-deoxy-2'-fluoroguanosine-3'-phosphate
  modified_base 11: mod_base = OTHER; note = 2'-deoxy-2'-fluorouridine-3'-phosphate
  modified_base 12: mod_base = OTHER; note = 2'-O-methylcytidine-3'-phosphate
  modified_base 13: mod_base = OTHER; note = 2'-O-methyluridine-3'-phosphate
  modified_base 14: mod_base = OTHER; note = 2'-O-methyluridine-3'-phosphate
  modified_base 15: mod_base = OTHER; note = 2'-O-methyluridine-3'-phosphate
  modified_base 16: mod_base = OTHER; note = 2'-O-methyluridine-3'-phosphate
  modified_base 17: mod_base = OTHER; note = 2'-O-methylcytidine-3'-phosphate
  modified_base 18: mod_base = OTHER; note = 2'-O-methyluridine-3'-phosphate
  modified_base 19: mod_base = OTHER; note = 2'-O-methyluridine-3'-phosphorothioate
  modified_base 20: mod_base = OTHER; note = 2'-O-methylguanosine-3'-phosphorothioate
  modified_base 21: mod_base = OTHER; note = 2'-O-methyladenosine
ctttatcaggtcttttcttga

SEQ ID NO: 352 - RNA, 21 nt, synthetic construct
  source 1..21: mol_type = other RNA
  modified_base 1: mod_base = OTHER; note = 2'-O-methyluridine-3'-phosphorothioate
  modified_base 2: mod_base = OTHER; note = 2'-O-methyluridine-3'-phosphorothioate
  modified_base 3: mod_base = OTHER; note = 2'-O-methyluridine-3'-phosphate
  modified_base 4: mod_base = OTHER; note = 2'-O-methyladenosine-3'-phosphate
  modified_base 5: mod_base = OTHER; note = 2'-O-methyluridine-3'-phosphate
  modified_base 6: mod_base = OTHER; note = 2'-O-hexadecyl-cytidine-3'-phosphate
  modified_base 7: mod_base = OTHER; note = 2'-deoxy-2'-fluoroadenosine-3'-phosphate
  modified_base 8: mod_base = OTHER; note = 2'-O-methylguanosine-3'-phosphate
  modified_base 9: mod_base = OTHER; note = 2'-deoxy-2'-fluoroguanosine-3'-phosphate
  modified_base 10: mod_base = OTHER; note = 2'-deoxy-2'-fluorouridine-3'-phosphate
  modified_base 11: mod_base = OTHER; note = 2'-deoxy-2'-fluorocytidine-3'-phosphate
  modified_base 12: mod_base = OTHER; note = 2'-O-methyluridine-3'-phosphate
  modified_base 13: mod_base = OTHER; note = 2'-O-methyluridine-3'-phosphate
  modified_base 14: mod_base = OTHER; note = 2'-O-methyluridine-3'-phosphate
  modified_base 15: mod_base = OTHER; note = 2'-O-methyluridine-3'-phosphate
  modified_base 16: mod_base = OTHER; note = 2'-O-methylcytidine-3'-phosphate
  modified_base 17: mod_base = OTHER; note = 2'-O-methyluridine-3'-phosphate
  modified_base 18: mod_base = OTHER; note = 2'-O-methyluridine-3'-phosphate
  modified_base 19: mod_base = OTHER; note = 2'-O-methylguanosine-3'-phosphorothioate
  modified_base 20: mod_base = OTHER; note = 2'-O-methyluridine-3'-phosphorothioate
  modified_base 21: mod_base = OTHER; note = 2'-O-methyladenosine
tttatcaggtcttttcttgta

SEQ ID NO: 353 - RNA, 21 nt, synthetic construct
  source 1..21: mol_type = other RNA
  modified_base 1: mod_base = OTHER; note = 2'-O-methyluridine-3'-phosphorothioate
  modified_base 2: mod_base = OTHER; note = 2'-O-methyluridine-3'-phosphorothioate
  modified_base 3: mod_base = OTHER; note = 2'-O-methyladenosine-3'-phosphate
  modified_base 4: mod_base = OTHER; note = 2'-O-methyluridine-3'-phosphate
  modified_base 5: mod_base = OTHER; note = 2'-O-methylcytidine-3'-phosphate
  modified_base 6: mod_base = OTHER; note = 2'-O-hexadecyl-adenosine-3'-phosphate
  modified_base 7: mod_base = OTHER; note = 2'-deoxy-2'-fluoroguanosine-3'-phosphate
  modified_base 8: mod_base = OTHER; note = 2'-O-methylguanosine-3'-phosphate
  modified_base 9: mod_base = OTHER; note = 2'-deoxy-2'-fluorouridine-3'-phosphate
  modified_base 10: mod_base = OTHER; note = 2'-deoxy-2'-fluorocytidine-3'-phosphate
  modified_base 11: mod_base = OTHER; note = 2'-deoxy-2'-fluorouridine-3'-phosphate
  modified_base 12: mod_base = OTHER; note = 2'-O-methyluridine-3'-phosphate
  modified_base 13: mod_base = OTHER; note = 2'-O-methyluridine-3'-phosphate
  modified_base 14: mod_base = OTHER; note = 2'-O-methyluridine-3'-phosphate
  modified_base 15: mod_base = OTHER; note = 2'-O-methylcytidine-3'-phosphate
  modified_base 16: mod_base = OTHER; note = 2'-O-methyluridine-3'-phosphate
  modified_base 17: mod_base = OTHER; note = 2'-O-methyluridine-3'-phosphate
  modified_base 18: mod_base = OTHER; note = 2'-O-methylguanosine-3'-phosphate
  modified_base 19: mod_base = OTHER; note = 2'-O-methyluridine-3'-phosphorothioate
  modified_base 20: mod_base = OTHER; note = 2'-O-methyluridine-3'-phosphorothioate
  modified_base 21: mod_base = OTHER; note = 2'-O-methyladenosine
ttatcaggtcttttcttgtta

SEQ ID NO: 354 - RNA, 21 nt, synthetic construct
  source 1..21: mol_type = other RNA
  modified_base 1: mod_base = OTHER; note = 2'-O-methyluridine-3'-phosphorothioate
  modified_base 2: mod_base = OTHER; note = 2'-O-methyladenosine-3'-phosphorothioate
  modified_base 3: mod_base = OTHER; note = 2'-O-methyluridine-3'-phosphate
  modified_base 4: mod_base = OTHER; note = 2'-O-methylcytidine-3'-phosphate
  modified_base 5: mod_base = OTHER; note = 2'-O-methyladenosine-3'-phosphate
  modified_base 6: mod_base = OTHER; note = 2'-O-hexadecyl-guanosine-3'-phosphate
  modified_base 7: mod_base = OTHER; note = 2'-deoxy-2'-fluoroguanosine-3'-phosphate
  modified_base 8: mod_base = OTHER; note = 2'-O-methyluridine-3'-phosphate
  modified_base 9: mod_base = OTHER; note = 2'-deoxy-2'-fluorocytidine-3'-phosphate
  modified_base 10: mod_base = OTHER; note = 2'-deoxy-2'-fluorouridine-3'-phosphate
  modified_base 11: mod_base = OTHER; note = 2'-deoxy-2'-fluorouridine-3'-phosphate
  modified_base 12: mod_base = OTHER; note = 2'-O-methyluridine-3'-phosphate
  modified_base 13: mod_base = OTHER; note = 2'-O-methyluridine-3'-phosphate
  modified_base 14: mod_base = OTHER; note = 2'-O-methylcytidine-3'-phosphate
  modified_base 15: mod_base = OTHER; note = 2'-O-methyluridine-3'-phosphate
  modified_base 16: mod_base = OTHER; note = 2'-O-methyluridine-3'-phosphate
  modified_base 17: mod_base = OTHER; note = 2'-O-methylguanosine-3'-phosphate
  modified_base 18: mod_base = OTHER; note = 2'-O-methyluridine-3'-phosphate
  modified_base 19: mod_base = OTHER; note = 2'-O-methyluridine-3'-phosphorothioate
  modified_base 20: mod_base = OTHER; note = 2'-O-methylcytidine-3'-phosphorothioate
  modified_base 21: mod_base = OTHER; note = 2'-O-methyladenosine
tatcaggtcttttcttgttca

SEQ ID NO: 355 - RNA, 21 nt, synthetic construct
  source 1..21: mol_type = other RNA
  modified_base 1: mod_base = OTHER; note = 2'-O-methyladenosine-3'-phosphorothioate
  modified_base 2: mod_base = OTHER; note = 2'-O-methyluridine-3'-phosphorothioate
  modified_base 3: mod_base = OTHER; note = 2'-O-methylcytidine-3'-phosphate
  modified_base 4: mod_base = OTHER; note = 2'-O-methyladenosine-3'-phosphate
  modified_base 5: mod_base = OTHER; note = 2'-O-methylguanosine-3'-phosphate
  modified_base 6: mod_base = OTHER; note = 2'-O-hexadecyl-guanosine-3'-phosphate
  modified_base 7: mod_base = OTHER; note = 2'-deoxy-2'-fluorouridine-3'-phosphate
  modified_base 8: mod_base = OTHER; note = 2'-O-methylcytidine-3'-phosphate
  modified_base 9: mod_base = OTHER; note = 2'-deoxy-2'-fluorouridine-3'-phosphate
  modified_base 10: mod_base = OTHER; note = 2'-deoxy-2'-fluorouridine-3'-phosphate
  modified_base 11: mod_base = OTHER; note = 2'-deoxy-2'-fluorouridine-3'-phosphate
  modified_base 12: mod_base = OTHER; note = 2'-O-methyluridine-3'-phosphate
  modified_base 13: mod_base = OTHER; note = 2'-O-methylcytidine-3'-phosphate
  modified_base 14: mod_base = OTHER; note = 2'-O-methyluridine-3'-phosphate
  modified_base 15: mod_base = OTHER; note = 2'-O-methyluridine-3'-phosphate
  modified_base 16: mod_base = OTHER; note = 2'-O-methylguanosine-3'-phosphate
  modified_base 17: mod_base = OTHER; note = 2'-O-methyluridine-3'-phosphate
  modified_base 18: mod_base = OTHER; note = 2'-O-methyluridine-3'-phosphate
  modified_base 19: mod_base = OTHER; note = 2'-O-methylcytidine-3'-phosphorothioate
  modified_base 20: mod_base = OTHER; note = 2'-O-methyladenosine-3'-phosphorothioate
  modified_base 21: mod_base = OTHER; note = 2'-O-methyladenosine
atcaggtcttttcttgttcaa

SEQ ID NO: 356 - RNA, 21 nt, synthetic construct
  source 1..21: mol_type = other RNA
  modified_base 1: mod_base = OTHER; note = 2'-O-methyluridine-3'-phosphorothioate
  modified_base 2: mod_base = OTHER; note = 2'-O-methylcytidine-3'-phosphorothioate
  modified_base 3: mod_base = OTHER; note = 2'-O-methyladenosine-3'-phosphate
  modified_base 4: mod_base = OTHER; note = 2'-O-methylguanosine-3'-phosphate
  modified_base 5: mod_base = OTHER; note = 2'-O-methylguanosine-3'-phosphate
  modified_base 6: mod_base = OTHER; note = 2'-O-hexadecyl-uridine-3'-phosphate
  modified_base 7: mod_base = OTHER; note = 2'-deoxy-2'-fluorocytidine-3'-phosphate
  modified_base 8: mod_base = OTHER; note = 2'-O-methyluridine-3'-phosphate
  modified_base 9: mod_base = OTHER; note = 2'-deoxy-2'-fluorouridine-3'-phosphate
  modified_base 10: mod_base = OTHER; note = 2'-deoxy-2'-fluorouridine-3'-phosphate
  modified_base 11: mod_base = OTHER; note = 2'-deoxy-2'-fluorouridine-3'-phosphate
  modified_base 12: mod_base = OTHER; note = 2'-O-methylcytidine-3'-phosphate
  modified_base 13: mod_base = OTHER; note = 2'-O-methyluridine-3'-phosphate
  modified_base 14: mod_base = OTHER; note = 2'-O-methyluridine-3'-phosphate
  modified_base 15: mod_base = OTHER; note = 2'-O-methylguanosine-3'-phosphate
  modified_base 16: mod_base = OTHER; note = 2'-O-methyluridine-3'-phosphate
  modified_base 17: mod_base = OTHER; note = 2'-O-methyluridine-3'-phosphate
  modified_base 18: mod_base = OTHER; note = 2'-O-methylcytidine-3'-phosphate
  modified_base 19: mod_base = OTHER; note = 2'-O-methyladenosine-3'-phosphorothioate
  modified_base 20: mod_base = OTHER; note = 2'-O-methylcytidine-3'-phosphorothioate
  modified_base 21: mod_base = OTHER; note = 2'-O-methyladenosine
tcaggtcttttcttgttcaca

SEQ ID NO: 357 - RNA, 21 nt, synthetic construct
  source 1..21: mol_type = other RNA
  modified_base 1: mod_base = OTHER; note = 2'-O-methylcytidine-3'-phosphorothioate
  modified_base 2: mod_base = OTHER; note = 2'-O-methyladenosine-3'-phosphorothioate
  modified_base 3: mod_base = OTHER; note = 2'-O-methylguanosine-3'-phosphate
  modified_base 4: mod_base = OTHER; note = 2'-O-methylguanosine-3'-phosphate
  modified_base 5: mod_base = OTHER; note = 2'-O-methyluridine-3'-phosphate
  modified_base 6: mod_base = OTHER; note = 2'-O-hexadecyl-cytidine-3'-phosphate
  modified_base 7: mod_base = OTHER; note = 2'-deoxy-2'-fluorouridine-3'-phosphate
  modified_base 8: mod_base = OTHER; note = 2'-O-methyluridine-3'-phosphate
  modified_base 9: mod_base = OTHER; note = 2'-deoxy-2'-fluorouridine-3'-phosphate
  modified_base 10: mod_base = OTHER; note = 2'-deoxy-2'-fluorouridine-3'-phosphate
  modified_base 11: mod_base = OTHER; note = 2'-deoxy-2'-fluorocytidine-3'-phosphate
  modified_base 12: mod_base = OTHER; note = 2'-O-methyluridine-3'-phosphate
  modified_base 13: mod_base = OTHER; note = 2'-O-methyluridine-3'-phosphate
  modified_base 14: mod_base = OTHER; note = 2'-O-methylguanosine-3'-phosphate
  modified_base 15: mod_base = OTHER; note = 2'-O-methyluridine-3'-phosphate
  modified_base 16: mod_base = OTHER; note = 2'-O-methyluridine-3'-phosphate
  modified_base 17: mod_base = OTHER; note = 2'-O-methylcytidine-3'-phosphate
  modified_base 18: mod_base = OTHER; note = 2'-O-methyladenosine-3'-phosphate
  modified_base 19: mod_base = OTHER; note = 2'-O-methylcytidine-3'-phosphorothioate
  modified_base 20: mod_base = OTHER; note = 2'-O-methylcytidine-3'-phosphorothioate
  modified_base 21: mod_base = OTHER; note = 2'-O-methyladenosine
caggtcttttcttgttcacca

SEQ ID NO: 358 - RNA, 21 nt, synthetic construct
  source 1..21: mol_type = other RNA
  modified_base 1: mod_base = OTHER; note = 2'-O-methylguanosine-3'-phosphorothioate
  modified_base 2: mod_base = OTHER; note = 2'-O-methylguanosine-3'-phosphorothioate
  modified_base 3: mod_base = OTHER; note = 2'-O-methyluridine-3'-phosphate
  modified_base 4: mod_base = OTHER; note = 2'-O-methylcytidine-3'-phosphate
  modified_base 5: mod_base = OTHER; note = 2'-O-methyluridine-3'-phosphate
  modified_base 6: mod_base = OTHER; note = 2'-O-hexadecyl-uridine-3'-phosphate
  modified_base 7: mod_base = OTHER; note = 2'-deoxy-2'-fluorouridine-3'-phosphate
  modified_base 8: mod_base = OTHER; note = 2'-O-methyluridine-3'-phosphate
  modified_base 9: mod_base = OTHER; note = 2'-deoxy-2'-fluorocytidine-3'-phosphate
  modified_base 10: mod_base = OTHER; note = 2'-deoxy-2'-fluorouridine-3'-phosphate
  modified_base 11: mod_base = OTHER; note = 2'-deoxy-2'-fluorouridine-3'-phosphate
  modified_base 12: mod_base = OTHER; note = 2'-O-methylguanosine-3'-phosphate
  modified_base 13: mod_base = OTHER; note = 2'-O-methyluridine-3'-phosphate
  modified_base 14: mod_base = OTHER; note = 2'-O-methyluridine-3'-phosphate
  modified_base 15: mod_base = OTHER; note = 2'-O-methylcytidine-3'-phosphate
  modified_base 16: mod_base = OTHER; note = 2'-O-methyladenosine-3'-phosphate
  modified_base 17: mod_base = OTHER; note = 2'-O-methylcytidine-3'-phosphate
  modified_base 18: mod_base = OTHER; note = 2'-O-methylcytidine-3'-phosphate
  modified_base 19: mod_base = OTHER; note = 2'-O-methylcytidine-3'-phosphorothioate
  modified_base 20: mod_base = OTHER; note = 2'-O-methyluridine-3'-phosphorothioate
  modified_base 21: mod_base = OTHER; note = 2'-O-methyladenosine
ggtcttttcttgttcacccta

SEQ ID NO: 359 - RNA, 21 nt, synthetic construct
  source 1..21: mol_type = other RNA
  modified_base 1: mod_base = OTHER; note = 2'-O-methyluridine-3'-phosphorothioate
  modified_base 2: mod_base = OTHER; note = 2'-O-methylcytidine-3'-phosphorothioate
  modified_base 3: mod_base = OTHER; note = 2'-O-methyluridine-3'-phosphate
  modified_base 4: mod_base = OTHER; note = 2'-O-methyluridine-3'-phosphate
  modified_base 5: mod_base = OTHER; note = 2'-O-methyluridine-3'-phosphate
  modified_base 6: mod_base = OTHER; note = 2'-O-hexadecyl-uridine-3'-phosphate
  modified_base 7: mod_base = OTHER; note = 2'-deoxy-2'-fluorocytidine-3'-phosphate
  modified_base 8: mod_base = OTHER; note = 2'-O-methyluridine-3'-phosphate
  modified_base 9: mod_base = OTHER; note = 2'-deoxy-2'-fluorouridine-3'-phosphate
  modified_base 10: mod_base = OTHER; note = 2'-deoxy-2'-fluoroguanosine-3'-phosphate
  modified_base 11: mod_base = OTHER; note = 2'-deoxy-2'-fluorouridine-3'-phosphate
  modified_base 12: mod_base = OTHER; note = 2'-O-methyluridine-3'-phosphate
  modified_base 13: mod_base = OTHER; note = 2'-O-methylcytidine-3'-phosphate
  modified_base 14: mod_base = OTHER; note = 2'-O-methyladenosine-3'-phosphate
  modified_base 15: mod_base = OTHER; note = 2'-O-methylcytidine-3'-phosphate
  modified_base 16: mod_base = OTHER; note = 2'-O-methylcytidine-3'-phosphate
  modified_base 17: mod_base = OTHER; note = 2'-O-methylcytidine-3'-phosphate
  modified_base 18: mod_base = OTHER; note = 2'-O-methyluridine-3'-phosphate
  modified_base 19: mod_base = OTHER; note = 2'-O-methylcytidine-3'-phosphorothioate
  modified_base 20: mod_base = OTHER; note = 2'-O-methyladenosine-3'-phosphorothioate
  modified_base 21: mod_base = OTHER; note = 2'-O-methyladenosine
tcttttcttgttcaccctcaa

SEQ ID NO: 360 - RNA, 21 nt, synthetic construct
  source 1..21: mol_type = other RNA
  modified_base 1: mod_base = OTHER; note = 2'-O-methylcytidine-3'-phosphorothioate
  modified_base 2: mod_base = OTHER; note = 2'-O-methyluridine-3'-phosphorothioate
  modified_base 3: mod_base = OTHER; note = 2'-O-methyluridine-3'-phosphate
  modified_base 4: mod_base = OTHER; note = 2'-O-methyluridine-3'-phosphate
  modified_base 5: mod_base = OTHER; note = 2'-O-methyluridine-3'-phosphate
  modified_base 6: mod_base = OTHER; note = 2'-O-hexadecyl-cytidine-3'-phosphate
  modified_base 7: mod_base = OTHER; note = 2'-deoxy-2'-fluorouridine-3'-phosphate
  modified_base 8: mod_base = OTHER; note = 2'-O-methyluridine-3'-phosphate
  modified_base 9: mod_base = OTHER; note = 2'-deoxy-2'-fluoroguanosine-3'-phosphate
  modified_base 10: mod_base = OTHER; note = 2'-deoxy-2'-fluorouridine-3'-phosphate
  modified_base 11: mod_base = OTHER; note = 2'-deoxy-2'-fluorouridine-3'-phosphate
  modified_base 12: mod_base = OTHER; note = 2'-O-methylcytidine-3'-phosphate
  modified_base 13: mod_base = OTHER; note = 2'-O-methyladenosine-3'-phosphate
  modified_base 14: mod_base = OTHER; note = 2'-O-methylcytidine-3'-phosphate
  modified_base 15: mod_base = OTHER; note = 2'-O-methylcytidine-3'-phosphate
  modified_base 16: mod_base = OTHER; note = 2'-O-methylcytidine-3'-phosphate
  modified_base 17: mod_base = OTHER; note = 2'-O-methyluridine-3'-phosphate
  modified_base 18: mod_base = OTHER; note = 2'-O-methylcytidine-3'-phosphate
  modified_base 19: mod_base = OTHER; note = 2'-O-methyladenosine-3'-phosphorothioate
  modified_base 20: mod_base = OTHER; note = 2'-O-methylguanosine-3'-phosphorothioate
  modified_base 21: mod_base = OTHER; note = 2'-O-methyladenosine
cttttcttgttcaccctcaga

SEQ ID NO: 361 - RNA, 21 nt, synthetic construct
  source 1..21: mol_type = other RNA
  modified_base 1: mod_base = OTHER; note = 2'-O-methyluridine-3'-phosphorothioate
  modified_base 2: mod_base = OTHER; note = 2'-O-methyluridine-3'-phosphorothioate
  modified_base 3: mod_base = OTHER; note = 2'-O-methyluridine-3'-phosphate
  modified_base 4: mod_base = OTHER; note = 2'-O-methyluridine-3'-phosphate
  modified_base 5: mod_base = OTHER; note = 2'-O-methylcytidine-3'-phosphate
  modified_base 6: mod_base = OTHER; note = 2'-O-hexadecyl-uridine-3'-phosphate
  modified_base 7: mod_base = OTHER; note = 2'-deoxy-2'-fluorouridine-3'-phosphate
  modified_base 8: mod_base = OTHER; note = 2'-O-methylguanosine-3'-phosphate
  modified_base 9: mod_base = OTHER; note = 2'-deoxy-2'-fluorouridine-3'-phosphate
  modified_base 10: mod_base = OTHER; note = 2'-deoxy-2'-fluorouridine-3'-phosphate
  modified_base 11: mod_base = OTHER; note = 2'-deoxy-2'-fluorocytidine-3'-phosphate
  modified_base 12: mod_base = OTHER; note = 2'-O-methyladenosine-3'-phosphate
  modified_base 13: mod_base = OTHER; note = 2'-O-methylcytidine-3'-phosphate
  modified_base 14: mod_base = OTHER; note = 2'-O-methylcytidine-3'-phosphate
  modified_base 15: mod_base = OTHER; note = 2'-O-methylcytidine-3'-phosphate
  modified_base 16: mod_base = OTHER; note = 2'-O-methyluridine-3'-phosphate
  modified_base 17: mod_base = OTHER; note = 2'-O-methylcytidine-3'-phosphate
  modified_base 18: mod_base = OTHER; note = 2'-O-methyladenosine-3'-phosphate
  modified_base 19: mod_base = OTHER; note = 2'-O-methylguanosine-3'-phosphorothioate
  modified_base 20: mod_base = OTHER; note = 2'-O-methylcytidine-3'-phosphorothioate
  modified_base 21: mod_base = OTHER; note = 2'-O-methyladenosine
ttttcttgttcaccctcagca

SEQ ID NO: 362 - RNA, 21 nt, synthetic construct
  source 1..21: mol_type = other RNA
  modified_base 1: mod_base = OTHER; note = 2'-O-methyluridine-3'-phosphorothioate
  modified_base 2: mod_base = OTHER; note = 2'-O-methyluridine-3'-phosphorothioate
  modified_base 3: mod_base = OTHER; note = 2'-O-methylcytidine-3'-phosphate
  modified_base 4: mod_base = OTHER; note = 2'-O-methyluridine-3'-phosphate
  modified_base 5: mod_base = OTHER; note = 2'-O-methyluridine-3'-phosphate
  modified_base 6: mod_base = OTHER; note = 2'-O-hexadecyl-guanosine-3'-phosphate
  modified_base 7: mod_base = OTHER; note = 2'-deoxy-2'-fluorouridine-3'-phosphate
  modified_base 8: mod_base = OTHER; note = 2'-O-methyluridine-3'-phosphate
  modified_base 9: mod_base = OTHER; note = 2'-deoxy-2'-fluorocytidine-3'-phosphate
  modified_base 10: mod_base = OTHER; note = 2'-deoxy-2'-fluoroadenosine-3'-phosphate
  modified_base 11: mod_base = OTHER; note = 2'-deoxy-2'-fluorocytidine-3'-phosphate
  modified_base 12: mod_base = OTHER; note = 2'-O-methylcytidine-3'-phosphate
  modified_base 13: mod_base = OTHER; note = 2'-O-methylcytidine-3'-phosphate
  modified_base 14: mod_base = OTHER; note = 2'-O-methyluridine-3'-phosphate
  modified_base 15: mod_base = OTHER; note = 2'-O-methylcytidine-3'-phosphate
  modified_base 16: mod_base = OTHER; note = 2'-O-methyladenosine-3'-phosphate
  modified_base 17: mod_base = OTHER; note = 2'-O-methylguanosine-3'-phosphate
  modified_base 18: mod_base = OTHER; note = 2'-O-methylcytidine-3'-phosphate
  modified_base 19: mod_base = OTHER; note = 2'-O-methylguanosine-3'-phosphorothioate
  modified_base 20: mod_base = OTHER; note = 2'-O-methyladenosine-3'-phosphorothioate
  modified_base 21: mod_base = OTHER; note = 2'-O-methyladenosine
ttcttgttcaccctcagcgaa

SEQ ID NO: 363 - RNA, 21 nt, synthetic construct
  source 1..21: mol_type = other RNA
  modified_base 1: mod_base = OTHER; note = 2'-O-methylcytidine-3'-phosphorothioate
  modified_base 2: mod_base = OTHER; note = 2'-O-methylcytidine-3'-phosphorothioate
  modified_base 3: mod_base = OTHER; note = 2'-O-methyluridine-3'-phosphate
  modified_base 4: mod_base = OTHER; note = 2'-O-methylcytidine-3'-phosphate
  modified_base 5: mod_base = OTHER; note = 2'-O-methyladenosine-3'-phosphate
  modified_base 6: mod_base = OTHER; note = 2'-O-hexadecyl-guanosine-3'-phosphate
  modified_base 7: mod_base = OTHER; note = 2'-deoxy-2'-fluorocytidine-3'-phosphate
  modified_base 8: mod_base = OTHER; note = 2'-O-methylguanosine-3'-phosphate
  modified_base 9: mod_base = OTHER; note = 2'-deoxy-2'-fluoroadenosine-3'-phosphate
  modified_base 10: mod_base = OTHER; note = 2'-deoxy-2'-fluoroguanosine-3'-phosphate
  modified_base 11: mod_base = OTHER; note = 2'-deoxy-2'-fluorouridine-3'-phosphate
  modified_base 12: mod_base = OTHER; note = 2'-O-methyladenosine-3'-phosphate
  modified_base 13: mod_base = OTHER; note = 2'-O-methylcytidine-3'-phosphate
  modified_base 14: mod_base = OTHER; note = 2'-O-methyluridine-3'-phosphate
  modified_base 15: mod_base = OTHER; note = 2'-O-methylguanosine-3'-phosphate
  modified_base 16: mod_base = OTHER; note = 2'-O-methyluridine-3'-phosphate
  modified_base 17: mod_base = OTHER; note = 2'-O-methylguanosine-3'-phosphate
  modified_base 18: mod_base = OTHER; note = 2'-O-methyladenosine-3'-phosphate
  modified_base 19: mod_base = OTHER; note = 2'-O-methylguanosine-3'-phosphorothioate
  modified_base 20: mod_base = OTHER; note = 2'-O-methyladenosine-3'-phosphorothioate
  modified_base 21: mod_base = OTHER; note = 2'-O-methyladenosine
cctcagcgagtactgtgagaa

SEQ ID NO: 364 - RNA, 21 nt, synthetic construct
  source 1..21: mol_type = other RNA
  modified_base 1: mod_base = OTHER; note = 2'-O-methyluridine-3'-phosphorothioate
  modified_base 2: mod_base = OTHER; note = 2'-O-methylcytidine-3'-phosphorothioate
  modified_base 3: mod_base = OTHER; note = 2'-O-methyladenosine-3'-phosphate
  modified_base 4: mod_base = OTHER; note = 2'-O-methylguanosine-3'-phosphate
  modified_base 5: mod_base = OTHER; note = 2'-O-methylcytidine-3'-phosphate
  modified_base 6: mod_base = OTHER; note = 2'-O-hexadecyl-guanosine-3'-phosphate
  modified_base 7: mod_base = OTHER; note = 2'-deoxy-2'-fluoroadenosine-3'-phosphate
  modified_base 8: mod_base = OTHER; note = 2'-O-methylguanosine-3'-phosphate
  modified_base 9: mod_base = OTHER; note = 2'-deoxy-2'-fluorouridine-3'-phosphate
  modified_base 10: mod_base = OTHER; note = 2'-deoxy-2'-fluoroadenosine-3'-phosphate
  modified_base 11: mod_base = OTHER; note = 2'-deoxy-2'-fluorocytidine-3'-phosphate
  modified_base 12: mod_base = OTHER; note = 2'-O-methyluridine-3'-phosphate
  modified_base 13: mod_base = OTHER; note = 2'-O-methylguanosine-3'-phosphate
  modified_base 14: mod_base = OTHER; note = 2'-O-methyluridine-3'-phosphate
  modified_base 15: mod_base = OTHER; note = 2'-O-methylguanosine-3'-phosphate
  modified_base 16: mod_base = OTHER; note = 2'-O-methyladenosine-3'-phosphate
  modified_base 17: mod_base = OTHER; note = 2'-O-methylguanosine-3'-phosphate
  modified_base 18: mod_base = OTHER; note = 2'-O-methyladenosine-3'-phosphate
  modified_base 19: mod_base = OTHER; note = 2'-O-methylguanosine-3'-phosphorothioate
  modified_base 20: mod_base = OTHER; note = 2'-O-methylcytidine-3'-phosphorothioate
  modified_base 21: mod_base = OTHER; note = 2'-O-methyladenosine
tcagcgagtactgtgagagca

SEQ ID NO: 365 - RNA, 21 nt, synthetic construct
  source 1..21: mol_type = other RNA
  modified_base 1: mod_base = OTHER; note = 2'-O-methylcytidine-3'-phosphorothioate
  modified_base 2: mod_base = OTHER; note = 2'-O-methyladenosine-3'-phosphorothioate
  modified_base 3: mod_base = OTHER; note = 2'-O-methylguanosine-3'-phosphate
  modified_base 4: mod_base = OTHER; note = 2'-O-methylcytidine-3'-phosphate
  modified_base 5: mod_base = OTHER; note = 2'-O-methylguanosine-3'-phosphate
  modified_base 6: mod_base = OTHER; note = 2'-O-hexadecyl-adenosine-3'-phosphate
  modified_base 7: mod_base = OTHER; note = 2'-deoxy-2'-fluoroguanosine-3'-phosphate
  modified_base 8: mod_base = OTHER; note = 2'-O-methyluridine-3'-phosphate
  modified_base 9: mod_base = OTHER; note = 2'-deoxy-2'-fluoroadenosine-3'-phosphate
  modified_base 10: mod_base = OTHER; note = 2'-deoxy-2'-fluorocytidine-3'-phosphate
  modified_base 11: mod_base = OTHER; note = 2'-deoxy-2'-fluorouridine-3'-phosphate
  modified_base 12: mod_base = OTHER; note = 2'-O-methylguanosine-3'-phosphate
  modified_base 13: mod_base = OTHER; note = 2'-O-methyluridine-3'-phosphate
  modified_base 14: mod_base = OTHER; note = 2'-O-methylguanosine-3'-phosphate
  modified_base 15: mod_base = OTHER; note = 2'-O-methyladenosine-3'-phosphate
  modified_base 16: mod_base = OTHER; note = 2'-O-methylguanosine-3'-phosphate
  modified_base 17: mod_base = OTHER; note = 2'-O-methyladenosine-3'-phosphate
  modified_base 18: mod_base = OTHER; note = 2'-O-methylguanosine-3'-phosphate
  modified_base 19: mod_base = OTHER; note = 2'-O-methylcytidine-3'-phosphorothioate
  modified_base 20: mod_base = OTHER; note = 2'-O-methyladenosine-3'-phosphorothioate
  modified_base 21: mod_base = OTHER; note = 2'-O-methyladenosine
cagcgagtactgtgagagcaa

SEQ ID NO: 366 - RNA, 21 nt, synthetic construct
  source 1..21: mol_type = other RNA
  modified_base 1: mod_base = OTHER; note = 2'-O-methyladenosine-3'-phosphorothioate
  modified_base 2: mod_base = OTHER; note = 2'-O-methylguanosine-3'-phosphorothioate
  modified_base 3: mod_base = OTHER; note = 2'-O-methylcytidine-3'-phosphate
  modified_base 4: mod_base = OTHER; note = 2'-O-methylguanosine-3'-phosphate
  modified_base 5: mod_base = OTHER; note = 2'-O-methyladenosine-3'-phosphate
  modified_base 6: mod_base = OTHER; note = 2'-O-hexadecyl-guanosine-3'-phosphate
  modified_base 7: mod_base = OTHER; note = 2'-deoxy-2'-fluorouridine-3'-phosphate
  modified_base 8: mod_base = OTHER; note = 2'-O-methyladenosine-3'-phosphate
  modified_base 9: mod_base = OTHER; note = 2'-deoxy-2'-fluorocytidine-3'-phosphate
  modified_base 10: mod_base = OTHER; note = 2'-deoxy-2'-fluorouridine-3'-phosphate
  modified_base 11: mod_base = OTHER; note = 2'-deoxy-2'-fluoroguanosine-3'-phosphate
  modified_base 12: mod_base = OTHER; note = 2'-O-methyluridine-3'-phosphate
  modified_base 13: mod_base = OTHER; note = 2'-O-methylguanosine-3'-phosphate
  modified_base 14: mod_base = OTHER; note = 2'-O-methyladenosine-3'-phosphate
  modified_base 15: mod_base = OTHER; note = 2'-O-methylguanosine-3'-phosphate
  modified_base 16: mod_base = OTHER; note = 2'-O-methyladenosine-3'-phosphate
  modified_base 17: mod_base = OTHER; note = 2'-O-methylguanosine-3'-phosphate
  modified_base 18: mod_base = OTHER; note = 2'-O-methylcytidine-3'-phosphate
  modified_base 19: mod_base = OTHER; note = 2'-O-methyladenosine-3'-phosphorothioate
  modified_base 20: mod_base = OTHER; note = 2'-O-methyladenosine-3'-phosphorothioate
  modified_base 21: mod_base = OTHER; note = 2'-O-methyladenosine
agcgagtactgtgagagcaaa

SEQ ID NO: 367 - RNA, 21 nt, synthetic construct
  source 1..21: mol_type = other RNA
  modified_base 1: mod_base = OTHER; note = 2'-O-methylguanosine-3'-phosphorothioate
  modified_base 2: mod_base = OTHER; note = 2'-O-methylcytidine-3'-phosphorothioate
  modified_base 3: mod_base = OTHER; note = 2'-O-methylguanosine-3'-phosphate
  modified_base 4: mod_base = OTHER; note = 2'-O-methyladenosine-3'-phosphate
  modified_base 5: mod_base = OTHER; note = 2'-O-methylguanosine-3'-phosphate
  modified_base 6: mod_base = OTHER; note = 2'-O-hexadecyl-uridine-3'-phosphate
  modified_base 7: mod_base = OTHER; note = 2'-deoxy-2'-fluoroadenosine-3'-phosphate
  modified_base 8: mod_base = OTHER; note = 2'-O-methylcytidine-3'-phosphate
  modified_base 9: mod_base = OTHER; note = 2'-deoxy-2'-fluorouridine-3'-phosphate
  modified_base 10: mod_base = OTHER; note = 2'-deoxy-2'-fluoroguanosine-3'-phosphate
  modified_base 11: mod_base = OTHER; note = 2'-deoxy-2'-fluorouridine-3'-phosphate
  modified_base 12: mod_base = OTHER; note = 2'-O-methylguanosine-3'-phosphate
  modified_base 13: mod_base = OTHER; note = 2'-O-methyladenosine-3'-phosphate
  modified_base 14: mod_base = OTHER; note = 2'-O-methylguanosine-3'-phosphate
  modified_base 15: mod_base = OTHER; note = 2'-O-methyladenosine-3'-phosphate
  modified_base 16: mod_base = OTHER; note = 2'-O-methylguanosine-3'-phosphate
  modified_base 17: mod_base = OTHER; note = 2'-O-methylcytidine-3'-phosphate
  modified_base 18: mod_base = OTHER; note = 2'-O-methyladenosine-3'-phosphate
  modified_base 19: mod_base = OTHER; note = 2'-O-methyladenosine-3'-phosphorothioate
  modified_base 20: mod_base = OTHER; note = 2'-O-methylguanosine-3'-phosphorothioate
  modified_base 21: mod_base = OTHER; note = 2'-O-methyladenosine
gcgagtactgtgagagcaaga

SEQ ID NO: 368 - RNA, 21 nt, synthetic construct
  source 1..21: mol_type = other RNA
  modified_base 1: mod_base = OTHER; note = 2'-O-methylcytidine-3'-phosphorothioate
  modified_base 2: mod_base = OTHER; note = 2'-O-methylguanosine-3'-phosphorothioate
  modified_base 3: mod_base = OTHER; note = 2'-O-methyladenosine-3'-phosphate
  modified_base 4: mod_base = OTHER; note = 2'-O-methylguanosine-3'-phosphate
  modified_base 5: mod_base = OTHER; note = 2'-O-methyluridine-3'-phosphate
  modified_base 6: mod_base = OTHER; note = 2'-O-hexadecyl-adenosine-3'-phosphate
  modified_base 7: mod_base = OTHER; note = 2'-deoxy-2'-fluorocytidine-3'-phosphate
  modified_base 8: mod_base = OTHER; note = 2'-O-methyluridine-3'-phosphate
  modified_base 9: mod_base = OTHER; note = 2'-deoxy-2'-fluoroguanosine-3'-phosphate
  modified_base 10: mod_base = OTHER; note = 2'-deoxy-2'-fluorouridine-3'-phosphate
  modified_base 11: mod_base = OTHER; note = 2'-deoxy-2'-fluoroguanosine-3'-phosphate
  modified_base 12: mod_base = OTHER; note = 2'-O-methyladenosine-3'-phosphate
  modified_base 13: mod_base = OTHER; note = 2'-O-methylguanosine-3'-phosphate
  modified_base 14: mod_base = OTHER; note = 2'-O-methyladenosine-3'-phosphate
  modified_base 15: mod_base = OTHER; note = 2'-O-methylguanosine-3'-phosphate
  modified_base 16: mod_base = OTHER; note = 2'-O-methylcytidine-3'-phosphate
  modified_base 17: mod_base = OTHER; note = 2'-O-methyladenosine-3'-phosphate
  modified_base 18: mod_base = OTHER; note = 2'-O-methyladenosine-3'-phosphate
  modified_base 19: mod_base = OTHER; note = 2'-O-methylguanosine-3'-phosphorothioate
  modified_base 20: mod_base = OTHER; note = 2'-O-methyluridine-3'-phosphorothioate
  modified_base 21: mod_base = OTHER; note = 2'-O-methyladenosine
cgagtactgtgagagcaagta

SEQ ID NO: 369 - RNA, 21 nt, synthetic construct
  source 1..21: mol_type = other RNA
  modified_base 1: mod_base = OTHER; note = 2'-O-methylguanosine-3'-phosphorothioate
  modified_base 2: mod_base = OTHER; note = 2'-O-methyladenosine-3'-phosphorothioate
  modified_base 3: mod_base = OTHER; note = 2'-O-methylguanosine-3'-phosphate
  modified_base 4: mod_base = OTHER; note = 2'-O-methyluridine-3'-phosphate
  modified_base 5: mod_base = OTHER; note = 2'-O-methyladenosine-3'-phosphate
  modified_base 6: mod_base = OTHER; note = 2'-O-hexadecyl-cytidine-3'-phosphate
  modified_base 7: mod_base = OTHER; note = 2'-deoxy-2'-fluorouridine-3'-phosphate
  modified_base 8: mod_base = OTHER; note = 2'-O-methylguanosine-3'-phosphate
  modified_base 9: mod_base = OTHER; note = 2'-deoxy-2'-fluorouridine-3'-phosphate
  modified_base 10: mod_base = OTHER; note = 2'-deoxy-2'-fluoroguanosine-3'-phosphate
  modified_base 11: mod_base = OTHER; note = 2'-deoxy-2'-fluoroadenosine-3'-phosphate
  modified_base 12: mod_base = OTHER; note = 2'-O-methylguanosine-3'-phosphate
  modified_base 13: mod_base = OTHER; note = 2'-O-methyladenosine-3'-phosphate
  modified_base 14: mod_base = OTHER; note = 2'-O-methylguanosine-3'-phosphate
  modified_base 15: mod_base = OTHER; note = 2'-O-methylcytidine-3'-phosphate
  modified_base 16: mod_base = OTHER; note = 2'-O-methyladenosine-3'-phosphate
  modified_base 17: mod_base = OTHER; note = 2'-O-methyladenosine-3'-phosphate
  modified_base 18: mod_base = OTHER; note = 2'-O-methylguanosine-3'-phosphate
  modified_base 19: mod_base = OTHER; note = 2'-O-methyluridine-3'-phosphorothioate
  modified_base 20: mod_base = OTHER; note = 2'-O-methyladenosine-3'-phosphorothioate
  modified_base 21: mod_base = OTHER; note = 2'-O-methyladenosine
gagtactgtgagagcaagtaa

SEQ ID NO: 370 - RNA, 21 nt, synthetic construct
  source 1..21: mol_type = other RNA
  modified_base 1: mod_base = OTHER; note = 2'-O-methyladenosine-3'-phosphorothioate
  modified_base 2: mod_base = OTHER; note = 2'-O-methylguanosine-3'-phosphorothioate
  modified_base 3: mod_base = OTHER; note = 2'-O-methyluridine-3'-phosphate
  modified_base 4: mod_base = OTHER; note = 2'-O-methyladenosine-3'-phosphate
  modified_base 5: mod_base = OTHER; note = 2'-O-methylcytidine-3'-phosphate
  modified_base 6: mod_base = OTHER; note = 2'-O-hexadecyl-uridine-3'-phosphate
  modified_base 7: mod_base = OTHER; note = 2'-deoxy-2'-fluoroguanosine-3'-phosphate
  modified_base 8: mod_base = OTHER; note = 2'-O-methyluridine-3'-phosphate
  modified_base 9: mod_base = OTHER; note = 2'-deoxy-2'-fluoroguanosine-3'-phosphate
  modified_base 10: mod_base = OTHER; note = 2'-deoxy-2'-fluoroadenosine-3'-phosphate
  modified_base 11: mod_base = OTHER; note = 2'-deoxy-2'-fluoroguanosine-3'-phosphate
  modified_base 12: mod_base = OTHER; note = 2'-O-methyladenosine-3'-phosphate
  modified_base 13: mod_base = OTHER; note = 2'-O-methylguanosine-3'-phosphate
  modified_base 14: mod_base = OTHER; note = 2'-O-methylcytidine-3'-phosphate
  modified_base 15: mod_base = OTHER; note = 2'-O-methyladenosine-3'-phosphate
  modified_base 16: mod_base = OTHER; note = 2'-O-methyladenosine-3'-phosphate
  modified_base 17: mod_base = OTHER; note = 2'-O-methylguanosine-3'-phosphate
  modified_base 18: mod_base = OTHER; note = 2'-O-methyluridine-3'-phosphate
  modified_base 19: mod_base = OTHER; note = 2'-O-methyladenosine-3'-phosphorothioate
  modified_base 20: mod_base = OTHER; note = 2'-O-methylguanosine-3'-phosphorothioate
  modified_base 21: mod_base = OTHER; note = 2'-O-methyladenosine
agtactgtgagagcaagtaga

SEQ ID NO: 371 - RNA, 21 nt, synthetic construct
  source 1..21: mol_type = other RNA
  modified_base 1: mod_base = OTHER; note = 2'-O-methyluridine-3'-phosphorothioate
  modified_base 2: mod_base = OTHER; note = 2'-O-methyladenosine-3'-phosphorothioate
  modified_base 3: mod_base = OTHER; note = 2'-O-methylcytidine-3'-phosphate
  modified_base 4: mod_base = OTHER; note = 2'-O-methyluridine-3'-phosphate
  modified_base 5: mod_base = OTHER; note = 2'-O-methylguanosine-3'-phosphate
  modified_base 6: mod_base = OTHER; note = 2'-O-hexadecyl-uridine-3'-phosphate
  modified_base 7: mod_base = OTHER; note = 2'-deoxy-2'-fluoroguanosine-3'-phosphate
  modified_base 8: mod_base = OTHER; note = 2'-O-methyladenosine-3'-phosphate
  modified_base 9: mod_base = OTHER; note = 2'-deoxy-2'-fluoroguanosine-3'-phosphate
  modified_base 10: mod_base = OTHER; note = 2'-deoxy-2'-fluoroadenosine-3'-phosphate
  modified_base 11: mod_base = OTHER; note = 2'-deoxy-2'-fluoroguanosine-3'-phosphate
  modified_base 12: mod_base = OTHER; note = 2'-O-methylcytidine-3'-phosphate
  modified_base 13: mod_base = OTHER; note = 2'-O-methyladenosine-3'-phosphate
  modified_base 14: mod_base = OTHER; note = 2'-O-methyladenosine-3'-phosphate
  modified_base 15: mod_base = OTHER; note = 2'-O-methylguanosine-3'-phosphate
  modified_base 16: mod_base = OTHER; note = 2'-O-methyluridine-3'-phosphate
  modified_base 17: mod_base = OTHER; note = 2'-O-methyladenosine-3'-phosphate
  modified_base 18: mod_base = OTHER; note = 2'-O-methylguanosine-3'-phosphate
  modified_base 19: mod_base = OTHER; note = 2'-O-methyluridine-3'-phosphorothioate
  modified_base 20: mod_base = OTHER; note = 2'-O-methylguanosine-3'-phosphorothioate
  modified_base 21: mod_base = OTHER; note = 2'-O-methyladenosine
tactgtgagagcaagtagtga

SEQ ID NO: 372 - RNA, 21 nt, synthetic construct
  source 1..21: mol_type = other RNA
  modified_base 1: mod_base = OTHER; note = 2'-O-methyladenosine-3'-phosphorothioate
  modified_base 2: mod_base = OTHER; note = 2'-O-methyladenosine-3'-phosphorothioate
  modified_base 3: mod_base = OTHER; note = 2'-O-methyladenosine-3'-phosphate
  modified_base 4: mod_base = OTHER; note = 2'-O-methyladenosine-3'-phosphate
  modified_base 5: mod_base = OTHER; note = 2'-O-methylcytidine-3'-phosphate
  modified_base 6: mod_base = OTHER; note = 2'-O-hexadecyl-adenosine-3'-phosphate
  modified_base 7: mod_base = OTHER; note = 2'-deoxy-2'-fluoroadenosine-3'-phosphate
  modified_base 8: mod_base = OTHER; note = 2'-O-methyladenosine-3'-phosphate
  modified_base 9: mod_base = OTHER; note = 2'-deoxy-2'-fluoroadenosine-3'-phosphate
  modified_base 10: mod_base = OTHER; note = 2'-deoxy-2'-fluoroadenosine-3'-phosphate
  modified_base 11: mod_base = OTHER; note = 2'-deoxy-2'-fluorocytidine-3'-phosphate
  modified_base 12: mod_base = OTHER; note = 2'-O-methyladenosine-3'-phosphate
  modified_base 13: mod_base = OTHER; note = 2'-O-methylcytidine-3'-phosphate
  modified_base 14: mod_base = OTHER; note = 2'-O-methyladenosine-3'-phosphate
  modified_base 15: mod_base = OTHER; note = 2'-O-methylcytidine-3'-phosphate
  modified_base 16: mod_base = OTHER; note = 2'-O-methyladenosine-3'-phosphate
  modified_base 17: mod_base = OTHER; note = 2'-O-methylcytidine-3'-phosphate
  modified_base 18: mod_base = OTHER; note = 2'-O-methylcytidine-3'-phosphate
  modified_base 19: mod_base = OTHER; note = 2'-O-methyluridine-3'-phosphorothioate
  modified_base 20: mod_base = OTHER; note = 2'-O-methylcytidine-3'-phosphorothioate
  modified_base 21: mod_base = OTHER; note = 2'-O-methyladenosine
aaaacaaaaacacacacctca

SEQ ID NO: 373 - RNA, 21 nt, synthetic construct
  source 1..21: mol_type = other RNA
  modified_base 1: mod_base = OTHER; note = 2'-O-methyladenosine-3'-phosphorothioate
  modified_base 2: mod_base = OTHER; note = 2'-O-methylcytidine-3'-phosphorothioate
  modified_base 3: mod_base = OTHER; note = 2'-O-methyladenosine-3'-phosphate
  modified_base 4: mod_base = OTHER; note = 2'-O-methylcytidine-3'-phosphate
  modified_base 5: mod_base = OTHER; note = 2'-O-methylcytidine-3'-phosphate
  modified_base 6: mod_base = OTHER; note = 2'-O-hexadecyl-uridine-3'-phosphate
  modified_base 7: mod_base = OTHER; note = 2'-deoxy-2'-fluorocytidine-3'-phosphate
  modified_base 8: mod_base = OTHER; note = 2'-O-methylcytidine-3'-phosphate
  modified_base 9: mod_base = OTHER; note = 2'-deoxy-2'-fluorouridine-3'-phosphate
  modified_base 10: mod_base = OTHER; note = 2'-deoxy-2'-fluoroadenosine-3'-phosphate
  modified_base 11: mod_base = OTHER; note = 2'-deoxy-2'-fluoroadenosine-3'-phosphate
  modified_base 12: mod_base = OTHER; note = 2'-O-methyladenosine-3'-phosphate
  modified_base 13: mod_base = OTHER; note = 2'-O-methylcytidine-3'-phosphate
  modified_base 14: mod_base = OTHER; note = 2'-O-methylcytidine-3'-phosphate
  modified_base 15: mod_base = OTHER; note = 2'-O-methylcytidine-3'-phosphate
  modified_base 16: mod_base = OTHER; note = 2'-O-methyladenosine-3'-phosphate
  modified_base 17: mod_base = OTHER; note = 2'-O-methylcytidine-3'-phosphate
  modified_base 18: mod_base = OTHER; note = 2'-O-methyladenosine-3'-phosphate
  modified_base 19: mod_base = OTHER; note = 2'-O-methylcytidine-3'-phosphorothioate
  modified_base 20: mod_base = OTHER; note = 2'-O-methylcytidine-3'-phosphorothioate
  modified_base 21: mod_base = OTHER; note = 2'-O-methyladenosine
acacctcctaaacccacacca

SEQ ID NO: 374 - RNA, 21 nt, synthetic construct
  source 1..21: mol_type = other RNA
  modified_base 1: mod_base = OTHER; note = 2'-O-methyladenosine-3'-phosphorothioate
  modified_base 2: mod_base = OTHER; note = 2'-O-methylcytidine-3'-phosphorothioate
  modified_base 3: mod_base = OTHER; note = 2'-O-methylcytidine-3'-phosphate
  modified_base 4: mod_base = OTHER; note = 2'-O-methyluridine-3'-phosphate
  modified_base 5: mod_base = OTHER; note = 2'-O-methylcytidine-3'-phosphate
  modified_base 6: mod_base = OTHER; note = 2'-O-hexadecyl-cytidine-3'-phosphate
  modified_base 7: mod_base = OTHER; note = 2'-deoxy-2'-fluorouridine-3'-phosphate
  modified_base 8: mod_base = OTHER; note = 2'-O-methyladenosine-3'-phosphate
  modified_base 9: mod_base = OTHER; note = 2'-deoxy-2'-fluoroadenosine-3'-phosphate
  modified_base 10: mod_base = OTHER; note = 2'-deoxy-2'-fluoroadenosine-3'-phosphate
  modified_base 11: mod_base = OTHER; note = 2'-deoxy-2'-fluorocytidine-3'-phosphate
  modified_base 12: mod_base = OTHER; note = 2'-O-methylcytidine-3'-phosphate
  modified_base 13: mod_base = OTHER; note = 2'-O-methylcytidine-3'-phosphate
  modified_base 14: mod_base = OTHER; note = 2'-O-methyladenosine-3'-phosphate
  modified_base 15: mod_base = OTHER; note = 2'-O-methylcytidine-3'-phosphate
  modified_base 16: mod_base = OTHER; note = 2'-O-methyladenosine-3'-phosphate
  modified_base 17: mod_base = OTHER; note = 2'-O-methylcytidine-3'-phosphate
  modified_base 18: mod_base = OTHER; note = 2'-O-methylcytidine-3'-phosphate
  modified_base 19: mod_base = OTHER; note = 2'-O-methyluridine-3'-phosphorothioate
  modified_base 20: mod_base = OTHER; note = 2'-O-methylguanosine-3'-phosphorothioate
  modified_base 21: mod_base = OTHER; note = 2'-O-methyladenosine
acctcctaaacccacacctga

SEQ ID NO: 375 - RNA, 21 nt, synthetic construct
  source 1..21: mol_type = other RNA
  modified_base 1: mod_base = OTHER; note = 2'-O-methylcytidine-3'-phosphorothioate
  modified_base 2: mod_base = OTHER; note = 2'-O-methyluridine-3'-phosphorothioate
  modified_base 3: mod_base = OTHER; note = 2'-O-methylcytidine-3'-phosphate
  modified_base 4: mod_base = OTHER; note = 2'-O-methylcytidine-3'-phosphate
  modified_base 5: mod_base = OTHER; note = 2'-O-methyluridine-3'-phosphate
  modified_base 6: mod_base = OTHER; note = 2'-O-hexadecyl-adenosine-3'-phosphate
  modified_base 7: mod_base = OTHER; note = 2'-deoxy-2'-fluoroadenosine-3'-phosphate
  modified_base 8: mod_base = OTHER; note = 2'-O-methyladenosine-3'-phosphate
  modified_base 9: mod_base = OTHER; note = 2'-deoxy-2'-fluorocytidine-3'-phosphate
  modified_base 10: mod_base = OTHER; note = 2'-deoxy-2'-fluorocytidine-3'-phosphate
  modified_base 11: mod_base = OTHER; note = 2'-deoxy-2'-fluorocytidine-3'-phosphate
  modified_base 12: mod_base = OTHER; note = 2'-O-methyladenosine-3'-phosphate
  modified_base 13: mod_base = OTHER; note = 2'-O-methylcytidine-3'-phosphate
  modified_base 14: mod_base = OTHER; note = 2'-O-methyladenosine-3'-phosphate
  modified_base 15: mod_base = OTHER; note = 2'-O-methylcytidine-3'-phosphate
  modified_base 16: mod_base = OTHER; note = 2'-O-methylcytidine-3'-phosphate
  modified_base 17: mod_base = OTHER; note = 2'-O-methyluridine-3'-phosphate
  modified_base 18: mod_base = OTHER; note = 2'-O-methylguanosine-3'-phosphate
  modified_base 19: mod_base = OTHER; note = 2'-O-methylcytidine-3'-phosphorothioate
  modified_base 20: mod_base = OTHER; note = 2'-O-methyluridine-3'-phosphorothioate
  modified_base 21: mod_base = OTHER; note = 2'-O-methyladenosine
ctcctaaacccacacctgcta

SEQ ID NO: 376 - RNA, 21 nt, synthetic construct
  source 1..21: mol_type = other RNA
  modified_base 1: mod_base = OTHER; note = 2'-O-methylcytidine-3'-phosphorothioate
  modified_base 2: mod_base = OTHER; note = 2'-O-methylcytidine-3'-phosphorothioate
  modified_base 3: mod_base = OTHER; note = 2'-O-methyladenosine-3'-phosphate
  modified_base 4: mod_base = OTHER; note = 2'-O-methylcytidine-3'-phosphate
  modified_base 5: mod_base = OTHER; note = 2'-O-methyladenosine-3'-phosphate
  modified_base 6: mod_base = OTHER; note = 2'-O-hexadecyl-cytidine-3'-phosphate
  modified_base 7: mod_base = OTHER; note = 2'-deoxy-2'-fluorocytidine-3'-phosphate
  modified_base 8: mod_base = OTHER; note = 2'-O-methyluridine-3'-phosphate
  modified_base 9: mod_base = OTHER; note = 2'-deoxy-2'-fluoroguanosine-3'-phosphate
  modified_base 10: mod_base = OTHER; note = 2'-deoxy-2'-fluorocytidine-3'-phosphate
  modified_base 11: mod_base = OTHER; note = 2'-deoxy-2'-fluorouridine-3'-phosphate
  modified_base 12: mod_base = OTHER; note = 2'-O-methylcytidine-3'-phosphate
  modified_base 13: mod_base = OTHER; note = 2'-O-methyluridine-3'-phosphate
  modified_base 14: mod_base = OTHER; note = 2'-O-methyluridine-3'-phosphate
  modified_base 15: mod_base = OTHER; note = 2'-O-methylguanosine-3'-phosphate
  modified_base 16: mod_base = OTHER; note = 2'-O-methylcytidine-3'-phosphate
  modified_base 17: mod_base = OTHER; note = 2'-O-methyluridine-3'-phosphate
  modified_base 18: mod_base = OTHER; note = 2'-O-methyladenosine-3'-phosphate
  modified_base 19: mod_base = OTHER; note = 2'-O-methylguanosine-3'-phosphorothioate
  modified_base 20: mod_base = OTHER; note = 2'-O-methyladenosine-3'-phosphorothioate
  modified_base 21: mod_base = OTHER; note = 2'-O-methyladenosine
ccacacctgctcttgctagaa

SEQ ID NO: 377 - RNA, 21 nt, synthetic construct
  source 1..21: mol_type = other RNA
  modified_base 1: mod_base = OTHER; note = 2'-O-methylcytidine-3'-phosphorothioate
  modified_base 2: mod_base = OTHER; note = 2'-O-methyladenosine-3'-phosphorothioate
  modified_base 3: mod_base = OTHER; note = 2'-O-methylcytidine-3'-phosphate
  modified_base 4: mod_base = OTHER; note = 2'-O-methyladenosine-3'-phosphate
  modified_base 5: mod_base = OTHER; note = 2'-O-methylcytidine-3'-phosphate
  modified_base 6: mod_base = OTHER; note = 2'-O-hexadecyl-cytidine-3'-phosphate
  modified_base 7: mod_base = OTHER; note = 2'-deoxy-2'-fluorouridine-3'-phosphate
  modified_base 8: mod_base = OTHER; note = 2'-O-methylguanosine-3'-phosphate
  modified_base 9: mod_base = OTHER; note = 2'-deoxy-2'-fluorocytidine-3'-phosphate
  modified_base 10: mod_base = OTHER; note = 2'-deoxy-2'-fluorouridine-3'-phosphate
  modified_base 11: mod_base = OTHER; note = 2'-deoxy-2'-fluorocytidine-3'-phosphate
  modified_base 12: mod_base = OTHER; note = 2'-O-methyluridine-3'-phosphate
  modified_base 13: mod_base = OTHER; note = 2'-O-methyluridine-3'-phosphate
  modified_base 14: mod_base = OTHER; note = 2'-O-methylguanosine-3'-phosphate
  modified_base 15: mod_base = OTHER; note = 2'-O-methylcytidine-3'-phosphate
  modified_base 16: mod_base = OTHER; note = 2'-O-methyluridine-3'-phosphate
  modified_base 17: mod_base = OTHER; note = 2'-O-methyladenosine-3'-phosphate
  modified_base 18: mod_base = OTHER; note = 2'-O-methylguanosine-3'-phosphate
  modified_base 19: mod_base = OTHER; note = 2'-O-methyladenosine-3'-phosphorothioate
  modified_base 20: mod_base = OTHER; note = 2'-O-methylcytidine-3'-phosphorothioate
  modified_base 21: mod_base = OTHER; note = 2'-O-methyladenosine
cacacctgctcttgctagaca

SEQ ID NO: 378 - RNA, 21 nt, synthetic construct
  source 1..21: mol_type = other RNA
  modified_base 1: mod_base = OTHER; note = 2'-O-methyladenosine-3'-phosphorothioate
  modified_base 2: mod_base = OTHER; note = 2'-O-methylcytidine-3'-phosphorothioate
  modified_base 3: mod_base = OTHER; note = 2'-O-methyladenosine-3'-phosphate
  modified_base 4: mod_base = OTHER; note = 2'-O-methylcytidine-3'-phosphate
  modified_base 5: mod_base = OTHER; note = 2'-O-methylcytidine-3'-phosphate
  modified_base 6: mod_base = OTHER; note = 2'-O-hexadecyl-uridine-3'-phosphate
  modified_base 7: mod_base = OTHER; note = 2'-deoxy-2'-fluoroguanosine-3'-phosphate
  modified_base 8: mod_base = OTHER; note = 2'-O-methylcytidine-3'-phosphate
  modified_base 9: mod_base = OTHER; note = 2'-deoxy-2'-fluorouridine-3'-phosphate
  modified_base 10: mod_base = OTHER; note = 2'-deoxy-2'-fluorocytidine-3'-phosphate
  modified_base 11: mod_base = OTHER; note = 2'-deoxy-2'-fluorouridine-3'-phosphate
  modified_base 12: mod_base = OTHER; note = 2'-O-methyluridine-3'-phosphate
  modified_base 13: mod_base = OTHER; note = 2'-O-methylguanosine-3'-phosphate
  modified_base 14: mod_base = OTHER; note = 2'-O-methylcytidine-3'-phosphate
  modified_base 15: mod_base = OTHER; note = 2'-O-methyluridine-3'-phosphate
  modified_base 16: mod_base = OTHER; note = 2'-O-methyladenosine-3'-phosphate
  modified_base 17: mod_base = OTHER; note = 2'-O-methylguanosine-3'-phosphate
  modified_base 18: mod_base = OTHER; note = 2'-O-methyladenosine-3'-phosphate
  modified_base 19: mod_base = OTHER; note = 2'-O-methylcytidine-3'-phosphorothioate
  modified_base 20: mod_base = OTHER; note = 2'-O-methylcytidine-3'-phosphorothioate
  modified_base 21: mod_base = OTHER; note = 2'-O-methyladenosine
acacctgctcttgctagacca

SEQ ID NO: 379 - RNA, 23 nt, synthetic construct
  source 1..23: mol_type = other RNA
  modified_base 1: mod_base = OTHER; note = 2'-O-methyluridine-3'-phosphorothioate 5'-(E)-Vinylphosphonate
  modified_base 2: mod_base = OTHER; note = 2'-deoxy-2'-fluorouridine-3'-phosphorothioate
  modified_base 3: mod_base = OTHER; note = 2'-O-methylcytidine-3'-phosphate
  modified_base 4: mod_base = OTHER; note = 2'-O-methylguanosine-3'-phosphate
  modified_base 5: mod_base = OTHER; note = 2'-O-methyladenosine-3'-phosphate
  modified_base 6: mod_base = OTHER; note = 2'-deoxy-2'-fluoroguanosine-3'-phosphate
  modified_base 7: mod_base = OTHER; note = 2'-O-methyladenosine-3'-phosphate
  modified_base 8: mod_base = OTHER; note = 2'-deoxy-2'-fluoroadenosine-3'-phosphate
  modified_base 9: mod_base = OTHER; note = 2'-deoxy-2'-fluoroadenosine-3'-phosphate
  modified_base 10: mod_base = OTHER; note = 2'-O-methyladenosine-3'-phosphate
  modified_base 11: mod_base = OTHER; note = 2'-O-methylguanosine-3'-phosphate
  modified_base 12: mod_base = OTHER; note = 2'-O-methylguanosine-3'-phosphate
  modified_base 13: mod_base = OTHER; note = 2'-O-methylguanosine-3'-phosphate
  modified_base 14: mod_base = OTHER; note = 2'-deoxy-2'-fluoroadenosine-3'-phosphate
  modified_base 15: mod_base = OTHER; note = 2'-O-methylguanosine-3'-phosphate
  modified_base 16: mod_base = OTHER; note = 2'-deoxy-2'-fluorocytidine-3'-phosphate
  modified_base 17: mod_base = OTHER; note = 2'-O-methylcytidine-3'-phosphate
  modified_base 18: mod_base = OTHER; note = 2'-O-methyluridine-3'-phosphate
  modified_base 19: mod_base = OTHER; note = 2'-O-methylcytidine-3'-phosphate
  modified_base 20: mod_base = OTHER; note = 2'-O-methylguanosine-3'-phosphate
  modified_base 21: mod_base = OTHER; note = 2'-O-methylguanosine-3'-phosphorothioate
  modified_base 22: mod_base = OTHER; note = 2'-O-methylguanosine-3'-phosphorothioate
  modified_base 23: mod_base = OTHER; note = 2'-O-methyluridine
ttcgagaaaagggagcctcgggt

SEQ ID NO: 380 - RNA, 23 nt, synthetic construct
  source 1..23: mol_type = other RNA
  modified_base 1: mod_base = OTHER; note = 2'-O-methyluridine-3'-phosphorothioate 5'-(E)-Vinylphosphonate
  modified_base 2: mod_base = OTHER; note = 2'-deoxy-2'-fluoroadenosine-3'-phosphorothioate
  modified_base 3: mod_base = OTHER; note = 2'-O-methylguanosine-3'-phosphate
  modified_base 4: mod_base = OTHER; note = 2'-O-methylcytidine-3'-phosphate
  modified_base 5: mod_base = OTHER; note = 2'-O-methylguanosine-3'-phosphate
  modified_base 6: mod_base = OTHER; note = 2'-deoxy-2'-fluoroadenosine-3'-phosphate
  modified_base 7: mod_base = OTHER; note = 2'-O-methylcytidine-3'-phosphate
  modified_base 8: mod_base = OTHER; note = 2'-deoxy-2'-fluorouridine-3'-phosphate
  modified_base 9: mod_base = OTHER; note = 2'-deoxy-2'-fluoroguanosine-3'-phosphate
  modified_base 10: mod_base = OTHER; note = 2'-O-methylguanosine-3'-phosphate
  modified_base 11: mod_base = OTHER; note = 2'-O-methyluridine-3'-phosphate
  modified_base 12: mod_base = OTHER; note = 2'-O-methylguanosine-3'-phosphate
  modified_base 13: mod_base = OTHER; note = 2'-O-methylguanosine-3'-phosphate
  modified_base 14: mod_base = OTHER; note = 2'-deoxy-2'-fluoroadenosine-3'-phosphate
  modified_base 15: mod_base = OTHER; note = 2'-O-methyladenosine-3'-phosphate
  modified_base 16: mod_base = OTHER; note = 2'-deoxy-2'-fluorouridine-3'-phosphate
  modified_base 17: mod_base = OTHER; note = 2'-O-methyluridine-3'-phosphate
  modified_base 18: mod_base = OTHER; note = 2'-O-methylguanosine-3'-phosphate
  modified_base 19: mod_base = OTHER; note = 2'-O-methylcytidine-3'-phosphate
  modified_base 20: mod_base = OTHER; note = 2'-O-methylcytidine-3'-phosphate
  modified_base 21: mod_base = OTHER; note = 2'-O-methyluridine-3'-phosphorothioate
  modified_base 22: mod_base = OTHER; note = 2'-O-methylguanosine-3'-phosphorothioate
  modified_base 23: mod_base = OTHER; note = 2'-O-methylcytidine
tagcgactggtggaattgcctgc

SEQ ID NO: 381 - RNA, 23 nt, synthetic construct
  source 1..23: mol_type = other RNA
  modified_base 1: mod_base = OTHER; note = 2'-O-methyluridine-3'-phosphorothioate 5'-(E)-Vinylphosphonate
  modified_base 2: mod_base = OTHER; note = 2'-deoxy-2'-fluorouridine-3'-phosphorothioate
  modified_base 3: mod_base = OTHER; note = 2'-O-methyluridine-3'-phosphate
  modified_base 4: mod_base = OTHER; note = 2'-O-methylcytidine-3'-phosphate
  modified_base 5: mod_base = OTHER; note = 2'-O-methylguanosine-3'-phosphate
  modified_base 6: mod_base = OTHER; note = 2'-O-methylcytidine-3'-phosphate
  modified_base 7: mod_base = OTHER; note = cytidine-2'-phosphate
  modified_base 8: mod_base = OTHER; note = 2'-O-methyluridine-3'-phosphate
  modified_base 9: mod_base = OTHER; note = 2'-O-methylcytidine-3'-phosphate
  modified_base 10: mod_base = OTHER; note = 2'-O-methyluridine-3'-phosphate
  modified_base 11: mod_base = OTHER; note = 2'-O-methyladenosine-3'-phosphate
  modified_base 12: mod_base = OTHER; note = 2'-O-methylguanosine-3'-phosphate
  modified_base 13: mod_base = OTHER; note = 2'-O-methylcytidine-3'-phosphate
  modified_base 14: mod_base = OTHER; note = 2'-deoxy-2'-fluoroguanosine-3'-phosphate
  modified_base 15: mod_base = OTHER; note = 2'-O-methyladenosine-3'-phosphate
  modified_base 16: mod_base = OTHER; note = 2'-deoxy-2'-fluorocytidine-3'-phosphate
  modified_base 17: mod_base = OTHER; note = 2'-O-methyluridine-3'-phosphate
  modified_base 18: mod_base = OTHER; note = 2'-O-methylguanosine-3'-phosphate
  modified_base 19: mod_base = OTHER; note = 2'-O-methylguanosine-3'-phosphate
  modified_base 20: mod_base = OTHER; note = 2'-O-methyluridine-3'-phosphate
  modified_base 21: mod_base = OTHER; note = 2'-O-methylguanosine-3'-phosphorothioate
  modified_base 22: mod_base = OTHER; note = 2'-O-methylguanosine-3'-phosphorothioate
  modified_base 23: mod_base = OTHER; note = 2'-O-methyladenosine
tttcgcctctagcgactggtgga

SEQ ID NO: 382 - RNA, 23 nt, synthetic construct
  source 1..23: mol_type = other RNA
  modified_base 1: mod_base = OTHER; note = 2'-O-methyluridine-3'-phosphorothioate 5'-(E)-Vinylphosphonate
  modified_base 2: mod_base = OTHER; note = 2'-deoxy-2'-fluorouridine-3'-phosphorothioate
  modified_base 3: mod_base = OTHER; note = 2'-O-methyluridine-3'-phosphate
  modified_base 4: mod_base = OTHER; note = 2'-O-methyluridine-3'-phosphate
  modified_base 5: mod_base = OTHER; note = 2'-O-methylcytidine-3'-phosphate
  modified_base 6: mod_base = OTHER; note = 2'-O-methylguanosine-3'-phosphate
  modified_base 7: mod_base = OTHER; note = cytidine-2'-phosphate
  modified_base 8: mod_base = OTHER; note = 2'-O-methylcytidine-3'-phosphate
  modified_base 9: mod_base = OTHER; note = 2'-O-methyluridine-3'-phosphate
  modified_base 10: mod_base = OTHER; note = 2'-O-methylcytidine-3'-phosphate
  modified_base 11: mod_base = OTHER; note = 2'-O-methyluridine-3'-phosphate
  modified_base 12: mod_base = OTHER; note = 2'-O-methyladenosine-3'-phosphate
  modified_base 13: mod_base = OTHER; note = 2'-O-methylguanosine-3'-phosphate
  modified_base 14: mod_base = OTHER; note = 2'-deoxy-2'-fluorocytidine-3'-phosphate
  modified_base 15: mod_base = OTHER; note = 2'-O-methylguanosine-3'-phosphate
  modified_base 16: mod_base = OTHER; note = 2'-deoxy-2'-fluoroadenosine-3'-phosphate
  modified_base 17: mod_base = OTHER; note = 2'-O-methylcytidine-3'-phosphate
  modified_base 18: mod_base = OTHER; note = 2'-O-methyluridine-3'-phosphate
  modified_base 19: mod_base = OTHER; note = 2'-O-methylguanosine-3'-phosphate
  modified_base 20: mod_base = OTHER; note = 2'-O-methylguanosine-3'-phosphate
  modified_base 21: mod_base = OTHER; note = 2'-O-methyluridine-3'-phosphorothioate
  modified_base 22: mod_base = OTHER; note = 2'-O-methylguanosine-3'-phosphorothioate
  modified_base 23: mod_base = OTHER; note = 2'-O-methylguanosine
ttttcgcctctagcgactggtgg

SEQ ID NO: 383 - RNA, 23 nt, synthetic construct
  source 1..23: mol_type = other RNA
  modified_base 1: mod_base = OTHER; note = 2'-O-methyluridine-3'-phosphorothioate 5'-(E)-Vinylphosphonate
  modified_base 2: mod_base = OTHER; note = 2'-deoxy-2'-fluorouridine-3'-phosphorothioate
  modified_base 3: mod_base = OTHER; note = 2'-O-methylcytidine-3'-phosphate
  modified_base 4: mod_base = OTHER; note = 2'-O-methyluridine-3'-phosphate
  modified_base 5: mod_base = OTHER; note = 2'-O-methylcytidine-3'-phosphate
  modified_base 6: mod_base = OTHER; note = 2'-O-methyluridine-3'-phosphate
  modified_base 7: mod_base = OTHER; note = guanosine-2'-phosphate
  modified_base 8: mod_base = OTHER; note = 2'-O-methyladenosine-3'-phosphate
  modified_base 9: mod_base = OTHER; note = 2'-O-methylcytidine-3'-phosphate
  modified_base 10: mod_base = OTHER; note = 2'-O-methylcytidine-3'-phosphate
  modified_base 11: mod_base = OTHER; note = 2'-O-methylguanosine-3'-phosphate
  modified_base 12: mod_base = OTHER; note = 2'-O-methyladenosine-3'-phosphate
  modified_base 13: mod_base = OTHER; note = 2'-O-methyladenosine-3'-phosphate
  modified_base 14: mod_base = OTHER; note = 2'-deoxy-2'-fluoroguanosine-3'-phosphate
  modified_base 15: mod_base = OTHER; note = 2'-O-methylcytidine-3'-phosphate
  modified_base 16: mod_base = OTHER; note = 2'-deoxy-2'-fluorouridine-3'-phosphate
  modified_base 17: mod_base = OTHER; note = 2'-O-methylguanosine-3'-phosphate
  modified_base 18: mod_base = OTHER; note = 2'-O-methylguanosine-3'-phosphate
  modified_base 19: mod_base = OTHER; note = 2'-O-methylguanosine-3'-phosphate
  modified_base 20: mod_base = OTHER; note = 2'-O-methyluridine-3'-phosphate
  modified_base 21: mod_base = OTHER; note = 2'-O-methylguanosine-3'-phosphorothioate
  modified_base 22: mod_base = OTHER; note = 2'-O-methyluridine-3'-phosphorothioate
  modified_base 23: mod_base = OTHER; note = 2'-O-methylcytidine
ttctctgaccgaagctgggtgtc

SEQ ID NO: 384 - RNA, 23 nt, synthetic construct
  source 1..23: mol_type = other RNA
  modified_base 1: mod_base = OTHER; note = 2'-O-methyluridine-3'-phosphorothioate 5'-(E)-Vinylphosphonate
  modified_base 2: mod_base = OTHER; note = 2'-deoxy-2'-fluorouridine-3'-phosphorothioate
  modified_base 3: mod_base = OTHER; note = 2'-O-methyluridine-3'-phosphate
  modified_base 4: mod_base = OTHER; note = 2'-O-methyluridine-3'-phosphate
  modified_base 5: mod_base = OTHER; note = 2'-O-methylcytidine-3'-phosphate
  modified_base 6: mod_base = OTHER; note = 2'-O-methyluridine-3'-phosphate
  modified_base 7: mod_base = OTHER; note = cytidine-2'-phosphate
  modified_base 8: mod_base = OTHER; note = 2'-O-methyluridine-3'-phosphate
  modified_base 9: mod_base = OTHER; note = 2'-O-methylguanosine-3'-phosphate
  modified_base 10: mod_base = OTHER; note = 2'-O-methyladenosine-3'-phosphate
  modified_base 11: mod_base = OTHER; note = 2'-O-methylcytidine-3'-phosphate
  modified_base 12: mod_base = OTHER; note = 2'-O-methylcytidine-3'-phosphate
  modified_base 13: mod_base = OTHER; note = 2'-O-methylguanosine-3'-phosphate
  modified_base 14: mod_base = OTHER; note = 2'-deoxy-2'-fluoroadenosine-3'-phosphate
  modified_base 15: mod_base = OTHER; note = 2'-O-methyladenosine-3'-phosphate
  modified_base 16: mod_base = OTHER; note = 2'-deoxy-2'-fluoroguanosine-3'-phosphate
  modified_base 17: mod_base = OTHER; note = 2'-O-methylcytidine-3'-phosphate
  modified_base 18: mod_base = OTHER; note = 2'-O-methyluridine-3'-phosphate
  modified_base 19: mod_base = OTHER; note = 2'-O-methylguanosine-3'-phosphate
  modified_base 20: mod_base = OTHER; note = 2'-O-methylguanosine-3'-phosphate
  modified_base 21: mod_base = OTHER; note = 2'-O-methylguanosine-3'-phosphorothioate
  modified_base 22: mod_base = OTHER; note = 2'-O-methyluridine-3'-phosphorothioate
  modified_base 23: mod_base = OTHER; note = 2'-O-methylguanosine
ttttctctgaccgaagctgggtg

SEQ ID NO: 385 - RNA, 23 nt, synthetic construct
  source 1..23: mol_type = other RNA
  modified_base 1: mod_base = OTHER; note = 2'-O-methyluridine-3'-phosphorothioate 5'-(E)-Vinylphosphonate
  modified_base 2: mod_base = OTHER; note = 2'-deoxy-2'-fluorocytidine-3'-phosphorothioate
  modified_base 3: mod_base = OTHER; note = 2'-O-methyladenosine-3'-phosphate
  modified_base 4: mod_base = OTHER; note = 2'-O-methyluridine-3'-phosphate
  modified_base 5: mod_base = OTHER; note = 2'-O-methyluridine-3'-phosphate
  modified_base 6: mod_base = OTHER; note = 2'-O-methyluridine-3'-phosphate
  modified_base 7: mod_base = OTHER; note = cytidine-2'-phosphate
  modified_base 8: mod_base = OTHER; note = 2'-O-methyluridine-3'-phosphate
  modified_base 9: mod_base = OTHER; note = 2'-O-methylcytidine-3'-phosphate
  modified_base 10: mod_base = OTHER; note = 2'-O-methyluridine-3'-phosphate
  modified_base 11: mod_base = OTHER; note = 2'-O-methylguanosine-3'-phosphate
  modified_base 12: mod_base = OTHER; note = 2'-O-methyladenosine-3'-phosphate
  modified_base 13: mod_base = OTHER; note = 2'-O-methylcytidine-3'-phosphate
  modified_base 14: mod_base = OTHER; note = 2'-deoxy-2'-fluorocytidine-3'-phosphate
  modified_base 15: mod_base = OTHER; note = 2'-O-methylguanosine-3'-phosphate
  modified_base 16: mod_base = OTHER; note = 2'-deoxy-2'-fluoroadenosine-3'-phosphate
  modified_base 17: mod_base = OTHER; note = 2'-O-methyladenosine-3'-phosphate
  modified_base 18: mod_base = OTHER; note = 2'-O-methylguanosine-3'-phosphate
  modified_base 19: mod_base = OTHER; note = 2'-O-methylcytidine-3'-phosphate
  modified_base 20: mod_base = OTHER; note = 2'-O-methyluridine-3'-phosphate
  modified_base 21: mod_base = OTHER; note = 2'-O-methylguanosine-3'-phosphorothioate
  modified_base 22: mod_base = OTHER; note = 2'-O-methylguanosine-3'-phosphorothioate
  modified_base 23: mod_base = OTHER; note = 2'-O-methylguanosine
tcatttctctgaccgaagctggg

SEQ ID NO: 386 - RNA, 23 nt, synthetic construct
  source 1..23: mol_type = other RNA
  modified_base 1: mod_base = OTHER; note = 2'-O-methyluridine-3'-phosphorothioate 5'-(E)-Vinylphosphonate
  modified_base 2: mod_base = OTHER; note = 2'-deoxy-2'-fluorocytidine-3'-phosphorothioate
  modified_base 3: mod_base = OTHER; note = 2'-O-methyluridine-3'-phosphate
  modified_base 4: mod_base = OTHER; note = 2'-O-methylcytidine-3'-phosphate
  modified_base 5: mod_base = OTHER; note = 2'-O-methyladenosine-3'-phosphate
  modified_base 6: mod_base = OTHER; note = 2'-deoxy-2'-fluorouridine-3'-phosphate
  modified_base 7: mod_base = OTHER; note = 2'-O-methyluridine-3'-phosphate
  modified_base 8: mod_base = OTHER; note = 2'-deoxy-2'-fluorouridine-3'-phosphate
  modified_base 9: mod_base = OTHER; note = 2'-deoxy-2'-fluorocytidine-3'-phosphate
  modified_base 10: mod_base = OTHER; note = 2'-O-methyluridine-3'-phosphate
  modified_base 11: mod_base = OTHER; note = 2'-O-methylcytidine-3'-phosphate
  modified_base 12: mod_base = OTHER; note = 2'-O-methyluridine-3'-phosphate
  modified_base 13: mod_base = OTHER; note = 2'-O-methylguanosine-3'-phosphate
  modified_base 14: mod_base = OTHER; note = 2'-deoxy-2'-fluoroadenosine-3'-phosphate
  modified_base 15: mod_base = OTHER; note = 2'-O-methylcytidine-3'-phosphate
  modified_base 16: mod_base = OTHER; note = 2'-deoxy-2'-fluorocytidine-3'-phosphate
  modified_base 17: mod_base = OTHER; note = 2'-O-methylguanosine-3'-phosphate
  modified_base 18: mod_base = OTHER; note = 2'-O-methyladenosine-3'-phosphate
  modified_base 19: mod_base = OTHER; note = 2'-O-methyladenosine-3'-phosphate
  modified_base 20: mod_base = OTHER; note = 2'-O-methylguanosine-3'-phosphate
  modified_base 21: mod_base = OTHER; note = 2'-O-methylcytidine-3'-phosphorothioate
  modified_base 22: mod_base = OTHER; note = 2'-O-methyluridine-3'-phosphorothioate
  modified_base 23: mod_base = OTHER; note = 2'-O-methylguanosine
tctcatttctctgaccgaagctg

SEQ ID NO: 387 - RNA, 23 nt, synthetic construct
  source 1..23: mol_type = other RNA
  modified_base 1: mod_base = OTHER; note = 2'-O-methyluridine-3'-phosphorothioate 5'-(E)-Vinylphosphonate
  modified_base 2: mod_base = OTHER; note = 2'-deoxy-2'-fluorocytidine-3'-phosphorothioate
  modified_base 3: mod_base = OTHER; note = 2'-O-methylcytidine-3'-phosphate
  modified_base 4: mod_base = OTHER; note = 2'-O-methyluridine-3'-phosphate
  modified_base 5: mod_base = OTHER; note = 2'-O-methylcytidine-3'-phosphate
  modified_base 6: mod_base = OTHER; note = 2'-O-methyluridine-3'-phosphate
  modified_base 7: mod_base = OTHER; note = cytidine-2'-phosphate
  modified_base 8: mod_base = OTHER; note = 2'-O-methyladenosine-3'-phosphate
  modified_base 9: mod_base = OTHER; note = 2'-O-methyluridine-3'-phosphate
  modified_base 10: mod_base = OTHER; note = 2'-O-methyluridine-3'-phosphate
  modified_base 11: mod_base = OTHER; note = 2'-O-methyluridine-3'-phosphate
  modified_base 12: mod_base = OTHER; note = 2'-O-methylcytidine-3'-phosphate
  modified_base 13: mod_base = OTHER; note = 2'-O-methyluridine-3'-phosphate
  modified_base 14: mod_base = OTHER; note = 2'-deoxy-2'-fluorocytidine-3'-phosphate
  modified_base 15: mod_base = OTHER; note = 2'-O-methyluridine-3'-phosphate
  modified_base 16: mod_base = OTHER; note = 2'-deoxy-2'-fluoroguanosine-3'-phosphate
  modified_base 17: mod_base = OTHER; note = 2'-O-methyladenosine-3'-phosphate
  modified_base 18: mod_base = OTHER; note = 2'-O-methylcytidine-3'-phosphate
  modified_base 19: mod_base = OTHER; note = 2'-O-methylcytidine-3'-phosphate
  modified_base 20: mod_base = OTHER; note = 2'-O-methylguanosine-3'-phosphate
  modified_base 21: mod_base = OTHER; note = 2'-O-methyladenosine-3'-phosphorothioate
  modified_base 22: mod_base = OTHER; note = 2'-O-methyladenosine-3'-phosphorothioate
  modified_base 23: mod_base = OTHER; note = 2'-O-methylguanosine
tcctctcatttctctgaccgaag

SEQ ID NO: 388 - RNA, 23 nt, synthetic construct
  source 1..23: mol_type = other RNA
  modified_base 1: mod_base = OTHER; note = 2'-O-methyluridine-3'-phosphorothioate 5'-(E)-Vinylphosphonate
  modified_base 2: mod_base = OTHER; note = 2'-deoxy-2'-fluorouridine-3'-phosphorothioate
  modified_base 3: mod_base = OTHER; note = 2'-O-methylcytidine-3'-phosphate
  modified_base 4: mod_base = OTHER; note = 2'-O-methylcytidine-3'-phosphate
  modified_base 5: mod_base = OTHER; note = 2'-O-methylcytidine-3'-phosphate
  modified_base 6: mod_base = OTHER; note = 2'-O-methyluridine-3'-phosphate
  modified_base 7: mod_base = OTHER; note = cytidine-2'-phosphate
  modified_base 8: mod_base = OTHER; note = 2'-O-methyluridine-3'-phosphate
  modified_base 9: mod_base = OTHER; note = 2'-O-methylcytidine-3'-phosphate
  modified_base 10: mod_base = OTHER; note = 2'-O-methyladenosine-3'-phosphate
  modified_base 11: mod_base = OTHER; note = 2'-O-methyluridine-3'-phosphate
  modified_base 12: mod_base = OTHER; note = 2'-O-methyluridine-3'-phosphate
  modified_base 13: mod_base = OTHER; note = 2'-O-methyluridine-3'-phosphate
  modified_base 14: mod_base = OTHER; note = 2'-deoxy-2'-fluorocytidine-3'-phosphate
  modified_base 15: mod_base = OTHER; note = 2'-O-methyluridine-3'-phosphate
  modified_base 16: mod_base = OTHER; note = 2'-deoxy-2'-fluorocytidine-3'-phosphate
  modified_base 17: mod_base = OTHER; note = 2'-O-methyluridine-3'-phosphate
  modified_base 18: mod_base = OTHER; note = 2'-O-methylguanosine-3'-phosphate
  modified_base 19: mod_base = OTHER; note = 2'-O-methyladenosine-3'-phosphate
  modified_base 20: mod_base = OTHER; note = 2'-O-methylcytidine-3'-phosphate
  modified_base 21: mod_base = OTHER; note = 2'-O-methylcytidine-3'-phosphorothioate
  modified_base 22: mod_base = OTHER; note = 2'-O-methylguanosine-3'-phosphorothioate
  modified_base 23: mod_base = OTHER; note = 2'-O-methyladenosine
ttccctctcatttctctgaccga

SEQ ID NO: 389 - RNA, 23 nt, synthetic construct
  source 1..23: mol_type = other RNA
  modified_base 1: mod_base = OTHER; note = 2'-O-methyluridine-3'-phosphorothioate 5'-(E)-Vinylphosphonate
  modified_base 2: mod_base = OTHER; note = 2'-deoxy-2'-fluorouridine-3'-phosphorothioate
  modified_base 3: mod_base = OTHER; note = 2'-O-methyluridine-3'-phosphate
  modified_base 4: mod_base = OTHER; note = 2'-O-methyluridine-3'-phosphate
  modified_base 5: mod_base = OTHER; note = 2'-O-methylcytidine-3'-phosphate
  modified_base 6: mod_base = OTHER; note = 2'-O-methylcytidine-3'-phosphate
  modified_base 7: mod_base = OTHER; note = cytidine-2'-phosphate
  modified_base 8: mod_base = OTHER; note = 2'-O-methyluridine-3'-phosphate
  modified_base 9: mod_base = OTHER; note = 2'-O-methylcytidine-3'-phosphate
  modified_base 10: mod_base = OTHER; note = 2'-O-methyluridine-3'-phosphate
  modified_base 11: mod_base = OTHER; note = 2'-O-methylcytidine-3'-phosphate
  modified_base 12: mod_base = OTHER; note = 2'-O-methyladenosine-3'-phosphate
  modified_base 13: mod_base = OTHER; note = 2'-O-methyluridine-3'-phosphate
  modified_base 14: mod_base = OTHER; note = 2'-deoxy-2'-fluorouridine-3'-phosphate
  modified_base 15: mod_base = OTHER; note = 2'-O-methyluridine-3'-phosphate
  modified_base 16: mod_base = OTHER; note = 2'-deoxy-2'-fluorocytidine-3'-phosphate
  modified_base 17: mod_base = OTHER; note = 2'-O-methyluridine-3'-phosphate
  modified_base 18: mod_base = OTHER; note = 2'-O-methylcytidine-3'-phosphate
  modified_base 19: mod_base = OTHER; note = 2'-O-methyluridine-3'-phosphate
  modified_base 20: mod_base = OTHER; note = 2'-O-methylguanosine-3'-phosphate
  modified_base 21: mod_base = OTHER; note = 2'-O-methyladenosine-3'-phosphorothioate
  modified_base 22: mod_base = OTHER; note = 2'-O-methylcytidine-3'-phosphorothioate
  modified_base 23: mod_base = OTHER; note = 2'-O-methylcytidine
ttttccctctcatttctctgacc

SEQ ID NO: 390 - RNA, 23 nt, synthetic construct
  source 1..23: mol_type = other RNA
  modified_base 1: mod_base = OTHER; note = 2'-O-methyluridine-3'-phosphorothioate 5'-(E)-Vinylphosphonate
  modified_base 2: mod_base = OTHER; note = 2'-deoxy-2'-fluorocytidine-3'-phosphorothioate
  modified_base 3: mod_base = OTHER; note = 2'-O-methylguanosine-3'-phosphate
  modified_base 4: mod_base = OTHER; note = 2'-O-methylcytidine-3'-phosphate
  modified_base 5: mod_base = OTHER; note = 2'-O-methyladenosine-3'-phosphate
  modified_base 6: mod_base = OTHER; note = 2'-deoxy-2'-fluorouridine-3'-phosphate
  modified_base 7: mod_base = OTHER; note = 2'-O-methyluridine-3'-phosphate
  modified_base 8: mod_base = OTHER; note = 2'-deoxy-2'-fluorouridine-3'-phosphate
  modified_base 9: mod_base = OTHER; note = 2'-deoxy-2'-fluorouridine-3'-phosphate
  modified_base 10: mod_base = OTHER; note = 2'-O-methyluridine-3'-phosphate
  modified_base 11: mod_base = OTHER; note = 2'-O-methyladenosine-3'-phosphate
  modified_base 12: mod_base = OTHER; note = 2'-O-methylcytidine-3'-phosphate
  modified_base 13: mod_base = OTHER; note = 2'-O-methyluridine-3'-phosphate
  modified_base 14: mod_base = OTHER; note = 2'-deoxy-2'-fluorouridine-3'-phosphate
  modified_base 15: mod_base = OTHER; note = 2'-O-methyluridine-3'-phosphate
  modified_base 16: mod_base = OTHER; note = 2'-deoxy-2'-fluorocytidine-3'-phosphate
  modified_base 17: mod_base = OTHER; note = 2'-O-methylcytidine-3'-phosphate
  modified_base 18: mod_base = OTHER; note = 2'-O-methylcytidine-3'-phosphate
  modified_base 19: mod_base = OTHER; note = 2'-O-methyluridine-3'-phosphate
  modified_base 20: mod_base = OTHER; note = 2'-O-methylcytidine-3'-phosphate
  modified_base 21: mod_base = OTHER; note = 2'-O-methyluridine-3'-phosphorothioate
  modified_base 22: mod_base = OTHER; note = 2'-O-methylcytidine-3'-phosphorothioate
  modified_base 23: mod_base = OTHER; note = 2'-O-methyladenosine
tcgcatttttactttccctctca

SEQ ID NO: 391 - RNA, 23 nt, synthetic construct
  source 1..23: mol_type = other RNA
  modified_base 1: mod_base = OTHER; note = 2'-O-methyluridine-3'-phosphorothioate 5'-(E)-Vinylphosphonate
  modified_base 2: mod_base = OTHER; note = 2'-deoxy-2'-fluoroadenosine-3'-phosphorothioate
  modified_base 3: mod_base = OTHER; note = 2'-O-methylcytidine-3'-phosphate
  modified_base 4: mod_base = OTHER; note = 2'-O-methylguanosine-3'-phosphate
  modified_base 5: mod_base = OTHER; note = 2'-O-methylcytidine-3'-phosphate
  modified_base 6: mod_base = OTHER; note = 2'-deoxy-2'-fluoroadenosine-3'-phosphate
  modified_base 7: mod_base = OTHER; note = 2'-O-methyluridine-3'-phosphate
  modified_base 8: mod_base = OTHER; note = 2'-deoxy-2'-fluorouridine-3'-phosphate
  modified_base 9: mod_base = OTHER; note = 2'-deoxy-2'-fluorouridine-3'-phosphate
  modified_base 10: mod_base = OTHER; note = 2'-O-methyluridine-3'-phosphate
  modified_base 11: mod_base = OTHER; note = 2'-O-methyluridine-3'-phosphate
  modified_base 12: mod_base = OTHER; note = 2'-O-methyladenosine-3'-phosphate
  modified_base 13: mod_base = OTHER; note = 2'-O-methylcytidine-3'-phosphate
  modified_base 14: mod_base = OTHER; note = 2'-deoxy-2'-fluorouridine-3'-phosphate
  modified_base 15: mod_base = OTHER; note = 2'-O-methyluridine-3'-phosphate
  modified_base 16: mod_base = OTHER; note = 2'-deoxy-2'-fluorouridine-3'-phosphate
  modified_base 17: mod_base = OTHER; note = 2'-O-methylcytidine-3'-phosphate
  modified_base 18: mod_base = OTHER; note = 2'-O-methylcytidine-3'-phosphate
  modified_base 19: mod_base = OTHER; note = 2'-O-methylcytidine-3'-phosphate
  modified_base 20: mod_base = OTHER; note = 2'-O-methyluridine-3'-phosphate
  modified_base 21: mod_base = OTHER; note = 2'-O-methylcytidine-3'-phosphorothioate
  modified_base 22: mod_base = OTHER; note = 2'-O-methyluridine-3'-phosphorothioate
  modified_base 23: mod_base = OTHER; note = 2'-O-methylcytidine
tacgcatttttactttccctctc

SEQ ID NO: 392 - RNA, 23 nt, synthetic construct
  source 1..23: mol_type = other RNA
  modified_base 1: mod_base = OTHER; note = 2'-O-methyluridine-3'-phosphorothioate 5'-(E)-Vinylphosphonate
  modified_base 2: mod_base = OTHER; note = 2'-deoxy-2'-fluoroguanosine-3'-phosphorothioate
  modified_base 3: mod_base = OTHER; note = 2'-O-methyladenosine-3'-phosphate
  modified_base 4: mod_base = OTHER; note = 2'-O-methylcytidine-3'-phosphate
  modified_base 5: mod_base = OTHER; note = 2'-O-methylguanosine-3'-phosphate
  modified_base 6: mod_base = OTHER; note = 2'-deoxy-2'-fluorocytidine-3'-phosphate
  modified_base 7: mod_base = OTHER; note = 2'-O-methyladenosine-3'-phosphate
  modified_base 8: mod_base = OTHER; note = 2'-deoxy-2'-fluorouridine-3'-phosphate
  modified_base 9: mod_base = OTHER; note = 2'-deoxy-2'-fluorouridine-3'-phosphate
  modified_base 10: mod_base = OTHER; note = 2'-O-methyluridine-3'-phosphate
  modified_base 11: mod_base = OTHER; note = 2'-O-methyluridine-3'-phosphate
  modified_base 12: mod_base = OTHER; note = 2'-O-methyluridine-3'-phosphate
  modified_base 13: mod_base = OTHER; note = 2'-O-methyladenosine-3'-phosphate
  modified_base 14: mod_base = OTHER; note = 2'-deoxy-2'-fluorocytidine-3'-phosphate
  modified_base 15: mod_base = OTHER; note = 2'-O-methyluridine-3'-phosphate
  modified_base 16: mod_base = OTHER; note = 2'-deoxy-2'-fluorouridine-3'-phosphate
  modified_base 17: mod_base = OTHER; note = 2'-O-methyluridine-3'-phosphate
  modified_base 18: mod_base = OTHER; note = 2'-O-methylcytidine-3'-phosphate
  modified_base 19: mod_base = OTHER; note = 2'-O-methylcytidine-3'-phosphate
  modified_base 20: mod_base = OTHER; note = 2'-O-methylcytidine-3'-phosphate
  modified_base 21: mod_base = OTHER; note = 2'-O-methyluridine-3'-phosphorothioate
  modified_base 22: mod_base = OTHER; note = 2'-O-methylcytidine-3'-phosphorothioate
  modified_base 23: mod_base = OTHER; note = 2'-O-methyluridine
tgacgcatttttactttccctct

SEQ ID NO: 393 - RNA, 23 nt, synthetic construct
  source 1..23: mol_type = other RNA
  modified_base 1: mod_base = OTHER; note = 2'-O-methyluridine-3'-phosphorothioate 5'-(E)-Vinylphosphonate
  modified_base 2: mod_base = OTHER; note = 2'-deoxy-2'-fluorocytidine-3'-phosphorothioate
  modified_base 3: mod_base = OTHER; note = 2'-O-methylguanosine-3'-phosphate
  modified_base 4: mod_base = OTHER; note = 2'-O-methyladenosine-3'-phosphate
  modified_base 5: mod_base = OTHER; note = 2'-O-methylcytidine-3'-phosphate
  modified_base 6: mod_base = OTHER; note = 2'-deoxy-2'-fluoroguanosine-3'-phosphate
  modified_base 7: mod_base = OTHER; note = 2'-O-methylcytidine-3'-phosphate
  modified_base 8: mod_base = OTHER; note = 2'-deoxy-2'-fluoroadenosine-3'-phosphate
  modified_base 9: mod_base = OTHER; note = 2'-deoxy-2'-fluorouridine-3'-phosphate
  modified_base 10: mod_base = OTHER; note = 2'-O-methyluridine-3'-phosphate
  modified_base 11: mod_base = OTHER; note = 2'-O-methyluridine-3'-phosphate
  modified_base 12: mod_base = OTHER; note = 2'-O-methyluridine-3'-phosphate
  modified_base 13: mod_base = OTHER; note = 2'-O-methyluridine-3'-phosphate
  modified_base 14: mod_base = OTHER; note = 2'-deoxy-2'-fluoroadenosine-3'-phosphate
  modified_base 15: mod_base = OTHER; note = 2'-O-methylcytidine-3'-phosphate
  modified_base 16: mod_base = OTHER; note = 2'-deoxy-2'-fluorouridine-3'-phosphate
  modified_base 17: mod_base = OTHER; note = 2'-O-methyluridine-3'-phosphate
  modified_base 18: mod_base = OTHER; note = 2'-O-methyluridine-3'-phosphate
  modified_base 19: mod_base = OTHER; note = 2'-O-methylcytidine-3'-phosphate
  modified_base 20: mod_base = OTHER; note = 2'-O-methylcytidine-3'-phosphate
  modified_base 21: mod_base = OTHER; note = 2'-O-methylcytidine-3'-phosphorothioate
  modified_base 22: mod_base = OTHER; note = 2'-O-methyluridine-3'-phosphorothioate
  modified_base 23: mod_base = OTHER; note = 2'-O-methylcytidine
tcgacgcatttttactttccctc

SEQ ID NO: 394 - RNA, 23 nt, synthetic construct
  source 1..23: mol_type = other RNA
  modified_base 1: mod_base = OTHER; note = 2'-O-methyluridine-3'-phosphorothioate 5'-(E)-Vinylphosphonate
  modified_base 2: mod_base = OTHER; note = 2'-deoxy-2'-fluorouridine-3'-phosphorothioate
  modified_base 3: mod_base = OTHER; note = 2'-O-methylcytidine-3'-phosphate
  modified_base 4: mod_base = OTHER; note = 2'-O-methylguanosine-3'-phosphate
  modified_base 5: mod_base = OTHER; note = 2'-O-methyladenosine-3'-phosphate
  modified_base 6: mod_base = OTHER; note = 2'-deoxy-2'-fluorocytidine-3'-phosphate
  modified_base 7: mod_base = OTHER; note = 2'-O-methylguanosine-3'-phosphate
  modified_base 8: mod_base = OTHER; note = 2'-deoxy-2'-fluorocytidine-3'-phosphate
  modified_base 9: mod_base = OTHER; note = 2'-deoxy-2'-fluoroadenosine-3'-phosphate
  modified_base 10: mod_base = OTHER; note = 2'-O-methyluridine-3'-phosphate
  modified_base 11: mod_base = OTHER; note = 2'-O-methyluridine-3'-phosphate
  modified_base 12: mod_base = OTHER; note = 2'-O-methyluridine-3'-phosphate
  modified_base 13: mod_base = OTHER; note = 2'-O-methyluridine-3'-phosphate
  modified_base 14: mod_base = OTHER; note = 2'-deoxy-2'-fluorouridine-3'-phosphate
  modified_base 15: mod_base = OTHER; note = 2'-O-methyladenosine-3'-phosphate
  modified_base 16: mod_base = OTHER; note = 2'-deoxy-2'-fluorocytidine-3'-phosphate
  modified_base 17: mod_base = OTHER; note = 2'-O-methyluridine-3'-phosphate
  modified_base 18: mod_base = OTHER; note = 2'-O-methyluridine-3'-phosphate
  modified_base 19: mod_base = OTHER; note = 2'-O-methyluridine-3'-phosphate
  modified_base 20: mod_base = OTHER; note = 2'-O-methylcytidine-3'-phosphate
  modified_base 21: mod_base = OTHER; note = 2'-O-methylcytidine-3'-phosphorothioate
  modified_base 22: mod_base = OTHER; note = 2'-O-methylcytidine-3'-phosphorothioate
  modified_base 23: mod_base = OTHER; note = 2'-O-methyluridine
ttcgacgcatttttactttccct

SEQ ID NO: 395 - RNA, 23 nt, synthetic construct
  source 1..23: mol_type = other RNA
  modified_base 1: mod_base = OTHER; note = 2'-O-methyluridine-3'-phosphorothioate 5'-(E)-Vinylphosphonate
  modified_base 2: mod_base = OTHER; note = 2'-deoxy-2'-fluorocytidine-3'-phosphorothioate
  modified_base 3: mod_base = OTHER; note = 2'-O-methyluridine-3'-phosphate
  modified_base 4: mod_base = OTHER; note = 2'-O-methylcytidine-3'-phosphate
  modified_base 5: mod_base = OTHER; note = 2'-O-methylguanosine-3'-phosphate
  modified_base 6: mod_base = OTHER; note = 2'-deoxy-2'-fluoroadenosine-3'-phosphate
  modified_base 7: mod_base = OTHER; note = 2'-O-methylcytidine-3'-phosphate
  modified_base 8: mod_base = OTHER; note = 2'-deoxy-2'-fluoroguanosine-3'-phosphate
  modified_base 9: mod_base = OTHER; note = 2'-deoxy-2'-fluorocytidine-3'-phosphate
  modified_base 10: mod_base = OTHER; note = 2'-O-methyladenosine-3'-phosphate
  modified_base 11: mod_base = OTHER; note = 2'-O-methyluridine-3'-phosphate
  modified_base 12: mod_base = OTHER; note = 2'-O-methyluridine-3'-phosphate
  modified_base 13: mod_base = OTHER; note = 2'-O-methyluridine-3'-phosphate
  modified_base 14: mod_base = OTHER; note = 2'-deoxy-2'-fluorouridine-3'-phosphate
  modified_base 15: mod_base = OTHER; note = 2'-O-methyluridine-3'-phosphate
  modified_base 16: mod_base = OTHER; note = 2'-deoxy-2'-fluoroadenosine-3'-phosphate
  modified_base 17: mod_base = OTHER; note = 2'-O-methylcytidine-3'-phosphate
  modified_base 18: mod_base = OTHER; note = 2'-O-methyluridine-3'-phosphate
  modified_base 19: mod_base = OTHER; note = 2'-O-methyluridine-3'-phosphate
  modified_base 20: mod_base = OTHER; note = 2'-O-methyluridine-3'-phosphate
  modified_base 21: mod_base = OTHER; note = 2'-O-methylcytidine-3'-phosphorothioate
  modified_base 22: mod_base = OTHER; note = 2'-O-methylcytidine-3'-phosphorothioate
  modified_base 23: mod_base = OTHER; note = 2'-O-methylcytidine
tctcgacgcatttttactttccc

SEQ ID NO: 396 - RNA, 23 nt, synthetic construct
  source 1..23: mol_type = other RNA
  modified_base 1: mod_base = OTHER; note = 2'-O-methyluridine-3'-phosphorothioate 5'-(E)-Vinylphosphonate
  modified_base 2: mod_base = OTHER; note = 2'-deoxy-2'-fluoroguanosine-3'-phosphorothioate
  modified_base 3: mod_base = OTHER; note = 2'-O-methylcytidine-3'-phosphate
  modified_base 4: mod_base = OTHER; note = 2'-O-methyluridine-3'-phosphate
  modified_base 5: mod_base = OTHER; note = 2'-O-methylcytidine-3'-phosphate
  modified_base 6: mod_base = OTHER; note = 2'-deoxy-2'-fluoroguanosine-3'-phosphate
  modified_base 7: mod_base = OTHER; note = 2'-O-methyladenosine-3'-phosphate
  modified_base 8: mod_base = OTHER; note = 2'-deoxy-2'-fluorocytidine-3'-phosphate
  modified_base 9: mod_base = OTHER; note = 2'-deoxy-2'-fluoroguanosine-3'-phosphate
  modified_base 10: mod_base = OTHER; note = 2'-O-methylcytidine-3'-phosphate
  modified_base 11: mod_base = OTHER; note = 2'-O-methyladenosine-3'-phosphate
  modified_base 12: mod_base = OTHER; note = 2'-O-methyluridine-3'-phosphate
  modified_base 13: mod_base = OTHER; note = 2'-O-methyluridine-3'-phosphate
  modified_base 14: mod_base = OTHER; note = 2'-deoxy-2'-fluorouridine-3'-phosphate
  modified_base 15: mod_base = OTHER; note = 2'-O-methyluridine-3'-phosphate
  modified_base 16: mod_base = OTHER; note = 2'-deoxy-2'-fluorouridine-3'-phosphate
  modified_base 17: mod_base = OTHER; note = 2'-O-methyladenosine-3'-phosphate
  modified_base 18: mod_base = OTHER; note = 2'-O-methylcytidine-3'-phosphate
  modified_base 19: mod_base = OTHER; note = 2'-O-methyluridine-3'-phosphate
  modified_base 20: mod_base = OTHER; note = 2'-O-methyluridine-3'-phosphate
  modified_base 21: mod_base = OTHER; note = 2'-O-methyluridine-3'-phosphorothioate
  modified_base 22: mod_base = OTHER; note = 2'-O-methylcytidine-3'-phosphorothioate
  modified_base 23: mod_base = OTHER; note = 2'-O-methylcytidine
tgctcgacgcatttttactttcc

SEQ ID NO: 397 - RNA, 23 nt, synthetic construct
  source 1..23: mol_type = other RNA
  modified_base 1: mod_base = OTHER; note = 2'-O-methyluridine-3'-phosphorothioate 5'-(E)-Vinylphosphonate
  modified_base 2: mod_base = OTHER; note = 2'-deoxy-2'-fluoroadenosine-3'-phosphorothioate
  modified_base 3: mod_base = OTHER; note = 2'-O-methylguanosine-3'-phosphate
  modified_base 4: mod_base = OTHER; note = 2'-O-methylcytidine-3'-phosphate
  modified_base 5: mod_base = OTHER; note = 2'-O-methyluridine-3'-phosphate
  modified_base 6: mod_base = OTHER; note = 2'-deoxy-2'-fluorocytidine-3'-phosphate
  modified_base 7: mod_base = OTHER; note = 2'-O-methylguanosine-3'-phosphate
  modified_base 8: mod_base = OTHER; note = 2'-deoxy-2'-fluoroadenosine-3'-phosphate
  modified_base 9: mod_base = OTHER; note = 2'-deoxy-2'-fluorocytidine-3'-phosphate
  modified_base 10: mod_base = OTHER; note = 2'-O-methylguanosine-3'-phosphate
  modified_base 11: mod_base = OTHER; note = 2'-O-methylcytidine-3'-phosphate
  modified_base 12: mod_base = OTHER; note = 2'-O-methyladenosine-3'-phosphate
  modified_base 13: mod_base = OTHER; note = 2'-O-methyluridine-3'-phosphate
  modified_base 14: mod_base = OTHER; note = 2'-deoxy-2'-fluorouridine-3'-phosphate
  modified_base 15: mod_base = OTHER; note = 2'-O-methyluridine-3'-phosphate
  modified_base 16: mod_base = OTHER; note = 2'-deoxy-2'-fluorouridine-3'-phosphate
  modified_base 17: mod_base = OTHER; note = 2'-O-methyluridine-3'-phosphate
  modified_base 18: mod_base = OTHER; note = 2'-O-methyladenosine-3'-phosphate
  modified_base 19: mod_base = OTHER; note = 2'-O-methylcytidine-3'-phosphate
  modified_base 20: mod_base = OTHER; note = 2'-O-methyluridine-3'-phosphate
  modified_base 21: mod_base = OTHER; note = 2'-O-methyluridine-3'-phosphorothioate
  modified_base 22: mod_base = OTHER; note = 2'-O-methyluridine-3'-phosphorothioate
  modified_base 23: mod_base = OTHER; note = 2'-O-methylcytidine
tagctcgacgcatttttactttc

SEQ ID NO: 398 - RNA, 23 nt, synthetic construct
  source 1..23: mol_type = other RNA
  modified_base 1: mod_base = OTHER; note = 2'-O-methyluridine-3'-phosphorothioate 5'-(E)-Vinylphosphonate
  modified_base 2: mod_base = OTHER; note = 2'-deoxy-2'-fluoroguanosine-3'-phosphorothioate
  modified_base 3: mod_base = OTHER; note = 2'-O-methyladenosine-3'-phosphate
  modified_base 4: mod_base = OTHER; note = 2'-O-methylguanosine-3'-phosphate
  modified_base 5: mod_base = OTHER; note = 2'-O-methylcytidine-3'-phosphate
  modified_base 6: mod_base = OTHER; note = 2'-O-methyluridine-3'-phosphate
  modified_base 7: mod_base = OTHER; note = cytidine-2'-phosphate
  modified_base 8: mod_base = OTHER; note = 2'-O-methylguanosine-3'-phosphate
  modified_base 9: mod_base = OTHER; note = 2'-O-methyladenosine-3'-phosphate
  modified_base 10: mod_base = OTHER; note = 2'-O-methylcytidine-3'-phosphate
  modified_base 11: mod_base = OTHER; note = 2'-O-methylguanosine-3'-phosphate
  modified_base 12: mod_base = OTHER; note = 2'-O-methylcytidine-3'-phosphate
  modified_base 13: mod_base = OTHER; note = 2'-O-methyladenosine-3'-phosphate
  modified_base 14: mod_base = OTHER; note = 2'-deoxy-2'-fluorouridine-3'-phosphate
  modified_base 15: mod_base = OTHER; note = 2'-O-methyluridine-3'-phosphate
  modified_base 16: mod_base = OTHER; note = 2'-deoxy-2'-fluorouridine-3'-phosphate
  modified_base 17: mod_base = OTHER; note = 2'-O-methyluridine-3'-phosphate
  modified_base 18: mod_base = OTHER; note = 2'-O-methyluridine-3'-phosphate
  modified_base 19: mod_base = OTHER; note = 2'-O-methyladenosine-3'-phosphate
  modified_base 20: mod_base = OTHER; note = 2'-O-methylcytidine-3'-phosphate
  modified_base 21: mod_base = OTHER; note = 2'-O-methyluridine-3'-phosphorothioate
  modified_base 22: mod_base = OTHER; note = 2'-O-methyluridine-3'-phosphorothioate
  modified_base 23: mod_base = OTHER; note = 2'-O-methyluridine
tgagctcgacgcatttttacttt

SEQ ID NO: 399 - RNA, 23 nt, synthetic construct
  source 1..23: mol_type = other RNA
  modified_base 1: mod_base = OTHER; note = 2'-O-methyluridine-3'-phosphorothioate 5'-(E)-Vinylphosphonate
  modified_base 2: mod_base = OTHER; note = 2'-deoxy-2'-fluoroguanosine-3'-phosphorothioate
  modified_base 3: mod_base = OTHER; note = 2'-O-methylcytidine-3'-phosphate
  modified_base 4: mod_base = OTHER; note = 2'-O-methyluridine-3'-phosphate
  modified_base 5: mod_base = OTHER; note = 2'-O-methylcytidine-3'-phosphate
  modified_base 6: mod_base = OTHER; note = 2'-O-methyluridine-3'-phosphate
  modified_base 7: mod_base = OTHER; note = guanosine-2'-phosphate
  modified_base 8: mod_base = OTHER; note = 2'-O-methylguanosine-3'-phosphate
  modified_base 9: mod_base = OTHER; note = 2'-O-methyladenosine-3'-phosphate
  modified_base 10: mod_base = OTHER; note = 2'-O-methyladenosine-3'-phosphate
  modified_base 11: mod_base = OTHER; note = 2'-O-methylcytidine-3'-phosphate
  modified_base 12: mod_base = OTHER; note = 2'-O-methyluridine-3'-phosphate
  modified_base 13: mod_base = OTHER; note = 2'-O-methylcytidine-3'-phosphate
  modified_base 14: mod_base = OTHER; note = 2'-deoxy-2'-fluoroadenosine-3'-phosphate
  modified_base 15: mod_base = OTHER; note = 2'-O-methylguanosine-3'-phosphate
  modified_base 16: mod_base = OTHER; note = 2'-deoxy-2'-fluoroguanosine-3'-phosphate
  modified_base 17: mod_base = OTHER; note = 2'-O-methyladenosine-3'-phosphate
  modified_base 18: mod_base = OTHER; note = 2'-O-methylguanosine-3'-phosphate
  modified_base 19: mod_base = OTHER; note = 2'-O-methyluridine-3'-phosphate
  modified_base 20: mod_base = OTHER; note = 2'-O-methylcytidine-3'-phosphate
  modified_base 21: mod_base = OTHER; note = 2'-O-methylguanosine-3'-phosphorothioate
  modified_base 22: mod_base = OTHER; note = 2'-O-methylcytidine-3'-phosphorothioate
  modified_base 23: mod_base = OTHER; note = 2'-O-methylguanosine
tgctctggaactcaggagtcgcg

SEQ ID NO: 400 - RNA, 23 nt, synthetic construct
  source 1..23: mol_type = other RNA
  modified_base 1: mod_base = OTHER; note = 2'-O-methyluridine-3'-phosphorothioate 5'-(E)-Vinylphosphonate
  modified_base 2: mod_base = OTHER; note = 2'-deoxy-2'-fluoroadenosine-3'-phosphorothioate
  modified_base 3: mod_base = OTHER; note = 2'-O-methylguanosine-3'-phosphate
  modified_base 4: mod_base = OTHER; note = 2'-O-methylcytidine-3'-phosphate
  modified_base 5: mod_base = OTHER; note = 2'-O-methyluridine-3'-phosphate
  modified_base 6: mod_base = OTHER; note = 2'-O-methylcytidine-3'-phosphate
  modified_base 7: mod_base = OTHER; note = Thymidine-glycol nucleic acid (GNA), S-Isomer
  modified_base 8: mod_base = OTHER; note = 2'-O-methylguanosine-3'-phosphate
  modified_base 9: mod_base = OTHER; note = 2'-O-methylguanosine-3'-phosphate
  modified_base 10: mod_base = OTHER; note = 2'-O-methyladenosine-3'-phosphate
  modified_base 11: mod_base = OTHER; note = 2'-O-methyladenosine-3'-phosphate
  modified_base 12: mod_base = OTHER; note = 2'-O-methylcytidine-3'-phosphate
  modified_base 13: mod_base = OTHER; note = 2'-O-methyluridine-3'-phosphate
  modified_base 14: mod_base = OTHER; note = 2'-deoxy-2'-fluorocytidine-3'-phosphate
  modified_base 15: mod_base = OTHER; note = 2'-O-methyladenosine-3'-phosphate
  modified_base 16: mod_base = OTHER; note = 2'-deoxy-2'-fluoroguanosine-3'-phosphate
  modified_base 17: mod_base = OTHER; note = 2'-O-methylguanosine-3'-phosphate
  modified_base 18: mod_base = OTHER; note = 2'-O-methyladenosine-3'-phosphate
  modified_base 19: mod_base = OTHER; note = 2'-O-methylguanosine-3'-phosphate
  modified_base 20: mod_base = OTHER; note = 2'-O-methyluridine-3'-phosphate
  modified_base 21: mod_base = OTHER; note = 2'-O-methylcytidine-3'-phosphorothioate
  modified_base 22: mod_base = OTHER; note = 2'-O-methylguanosine-3'-phosphorothioate
  modified_base 23: mod_base = OTHER; note = 2'-O-methylcytidine
tagctctggaactcaggagtcgc

SEQ ID NO: 401 - RNA, 23 nt, synthetic construct
  source 1..23: mol_type = other RNA
  modified_base 1: mod_base = OTHER; note = 2'-O-methyluridine-3'-phosphorothioate 5'-(E)-Vinylphosphonate
  modified_base 2: mod_base = OTHER; note = 2'-deoxy-2'-fluoroadenosine-3'-phosphorothioate
  modified_base 3: mod_base = OTHER; note = 2'-O-methyladenosine-3'-phosphate
  modified_base 4: mod_base = OTHER; note = 2'-O-methylguanosine-3'-phosphate
  modified_base 5: mod_base = OTHER; note = 2'-O-methylcytidine-3'-phosphate
  modified_base 6: mod_base = OTHER; note = 2'-O-methyluridine-3'-phosphate
  modified_base 7: mod_base = OTHER; note = cytidine-2'-phosphate
  modified_base 8: mod_base = OTHER; note = 2'-O-methyluridine-3'-phosphate
  modified_base 9: mod_base = OTHER; note = 2'-O-methylguanosine-3'-phosphate
  modified_base 10: mod_base = OTHER; note = 2'-O-methylguanosine-3'-phosphate
  modified_base 11: mod_base = OTHER; note = 2'-O-methyladenosine-3'-phosphate
  modified_base 12: mod_base = OTHER; note = 2'-O-methyladenosine-3'-phosphate
  modified_base 13: mod_base = OTHER; note = 2'-O-methylcytidine-3'-phosphate
  modified_base 14: mod_base = OTHER; note = 2'-deoxy-2'-fluorouridine-3'-phosphate
  modified_base 15: mod_base = OTHER; note = 2'-O-methylcytidine-3'-phosphate
  modified_base 16: mod_base = OTHER; note = 2'-deoxy-2'-fluoroadenosine-3'-phosphate
  modified_base 17: mod_base = OTHER; note = 2'-O-methylguanosine-3'-phosphate
  modified_base 18: mod_base = OTHER; note = 2'-O-methylguanosine-3'-phosphate
  modified_base 19: mod_base = OTHER; note = 2'-O-methyladenosine-3'-phosphate
  modified_base 20: mod_base = OTHER; note = 2'-O-methylguanosine-3'-phosphate
  modified_base 21: mod_base = OTHER; note = 2'-O-methyluridine-3'-phosphorothioate
  modified_base 22: mod_base = OTHER; note = 2'-O-methylcytidine-3'-phosphorothioate
  modified_base 23: mod_base = OTHER; note = 2'-O-methylguanosine
taagctctggaactcaggagtcg

SEQ ID NO: 402 - RNA, 23 nt, synthetic construct
  source 1..23: mol_type = other RNA
  modified_base 1: mod_base = OTHER; note = 2'-O-methyluridine-3'-phosphorothioate 5'-(E)-Vinylphosphonate
  modified_base 2: mod_base = OTHER; note = 2'-deoxy-2'-fluorocytidine-3'-phosphorothioate
  modified_base 3: mod_base = OTHER; note = 2'-O-methyladenosine-3'-phosphate
  modified_base 4: mod_base = OTHER; note = 2'-O-methyladenosine-3'-phosphate
  modified_base 5: mod_base = OTHER; note = 2'-O-methylguanosine-3'-phosphate
  modified_base 6: mod_base = OTHER; note = 2'-O-methylcytidine-3'-phosphate
  modified_base 7: mod_base = OTHER; note = Thymidine-glycol nucleic acid (GNA), S-Isomer
  modified_base 8: mod_base = OTHER; note = 2'-O-methylcytidine-3'-phosphate
  modified_base 9: mod_base = OTHER; note = 2'-O-methyluridine-3'-phosphate
  modified_base 10: mod_base = OTHER; note = 2'-O-methylguanosine-3'-phosphate
  modified_base 11: mod_base = OTHER; note = 2'-O-methylguanosine-3'-phosphate
  modified_base 12: mod_base = OTHER; note = 2'-O-methyladenosine-3'-phosphate
  modified_base 13: mod_base = OTHER; note = 2'-O-methyladenosine-3'-phosphate
  modified_base 14: mod_base = OTHER; note = 2'-deoxy-2'-fluorocytidine-3'-phosphate
  modified_base 15: mod_base = OTHER; note = 2'-O-methyluridine-3'-phosphate
  modified_base 16: mod_base = OTHER; note = 2'-deoxy-2'-fluorocytidine-3'-phosphate
  modified_base 17: mod_base = OTHER; note = 2'-O-methyladenosine-3'-phosphate
  modified_base 18: mod_base = OTHER; note = 2'-O-methylguanosine-3'-phosphate
  modified_base 19: mod_base = OTHER; note = 2'-O-methylguanosine-3'-phosphate
  modified_base 20: mod_base = OTHER; note = 2'-O-methyladenosine-3'-phosphate
  modified_base 21: mod_base = OTHER; note = 2'-O-methylguanosine-3'-phosphorothioate
  modified_base 22: mod_base = OTHER; note = 2'-O-methyluridine-3'-phosphorothioate
  modified_base 23: mod_base = OTHER; note = 2'-O-methylcytidine
tcaagctctggaactcaggagtc

SEQ ID NO: 403 - RNA, 23 nt, synthetic construct
  source 1..23: mol_type = other RNA
  modified_base 1: mod_base = OTHER; note = 2'-O-methyluridine-3'-phosphorothioate 5'-(E)-Vinylphosphonate
  modified_base 2: mod_base = OTHER; note = 2'-deoxy-2'-fluoroguanosine-3'-phosphorothioate
  modified_base 3: mod_base = OTHER; note = 2'-O-methylcytidine-3'-phosphate
  modified_base 4: mod_base = OTHER; note = 2'-O-methyladenosine-3'-phosphate
  modified_base 5: mod_base = OTHER; note = 2'-O-methyladenosine-3'-phosphate
  modified_base 6: mod_base = OTHER; note = 2'-O-methylguanosine-3'-phosphate
  modified_base 7: mod_base = OTHER; note = cytidine-2'-phosphate
  modified_base 8: mod_base = OTHER; note = 2'-O-methyluridine-3'-phosphate
  modified_base 9: mod_base = OTHER; note = 2'-O-methylcytidine-3'-phosphate
  modified_base 10: mod_base = OTHER; note = 2'-O-methyluridine-3'-phosphate
  modified_base 11: mod_base = OTHER; note = 2'-O-methylguanosine-3'-phosphate
  modified_base 12: mod_base = OTHER; note = 2'-O-methylguanosine-3'-phosphate
  modified_base 13: mod_base = OTHER; note = 2'-O-methyladenosine-3'-phosphate
  modified_base 14: mod_base = OTHER; note = 2'-deoxy-2'-fluoroadenosine-3'-phosphate
  modified_base 15: mod_base = OTHER; note = 2'-O-methylcytidine-3'-phosphate
  modified_base 16: mod_base = OTHER; note = 2'-deoxy-2'-fluorouridine-3'-phosphate
  modified_base 17: mod_base = OTHER; note = 2'-O-methylcytidine-3'-phosphate
  modified_base 18: mod_base = OTHER; note = 2'-O-methyladenosine-3'-phosphate
  modified_base 19: mod_base = OTHER; note = 2'-O-methylguanosine-3'-phosphate
  modified_base 20: mod_base = OTHER; note = 2'-O-methylguanosine-3'-phosphate
  modified_base 21: mod_base = OTHER; note = 2'-O-methyladenosine-3'-phosphorothioate
  modified_base 22: mod_base = OTHER; note = 2'-O-methylguanosine-3'-phosphorothioate
  modified_base 23: mod_base = OTHER; note = 2'-O-methyluridine
tgcaagctctggaactcaggagt

SEQ ID NO: 404 - RNA, 23 nt, synthetic construct
  source 1..23: mol_type = other RNA
  modified_base 1: mod_base = OTHER; note = 2'-O-methyluridine-3'-phosphorothioate 5'-(E)-Vinylphosphonate
  modified_base 2: mod_base = OTHER; note = 2'-deoxy-2'-fluoroadenosine-3'-phosphorothioate
  modified_base 3: mod_base = OTHER; note = 2'-O-methylguanosine-3'-phosphate
  modified_base 4: mod_base = OTHER; note = 2'-O-methylcytidine-3'-phosphate
  modified_base 5: mod_base = OTHER; note = 2'-O-methyladenosine-3'-phosphate
  modified_base 6: mod_base = OTHER; note = 2'-O-methyladenosine-3'-phosphate
  modified_base 7: mod_base = OTHER; note = guanosine-2'-phosphate
  modified_base 8: mod_base = OTHER; note = 2'-O-methylcytidine-3'-phosphate
  modified_base 9: mod_base = OTHER; note = 2'-O-methyluridine-3'-phosphate
  modified_base 10: mod_base = OTHER; note = 2'-O-methylcytidine-3'-phosphate
  modified_base 11: mod_base = OTHER; note = 2'-O-methyluridine-3'-phosphate
  modified_base 12: mod_base = OTHER; note = 2'-O-methylguanosine-3'-phosphate
  modified_base 13: mod_base = OTHER; note = 2'-O-methylguanosine-3'-phosphate
  modified_base 14: mod_base = OTHER; note = 2'-deoxy-2'-fluoroadenosine-3'-phosphate
  modified_base 15: mod_base = OTHER; note = 2'-O-methyladenosine-3'-phosphate
  modified_base 16: mod_base = OTHER; note = 2'-deoxy-2'-fluorocytidine-3'-phosphate
  modified_base 17: mod_base = OTHER; note = 2'-O-methyluridine-3'-phosphate
  modified_base 18: mod_base = OTHER; note = 2'-O-methylcytidine-3'-phosphate
  modified_base 19: mod_base = OTHER; note = 2'-O-methyladenosine-3'-phosphate
  modified_base 20: mod_base = OTHER; note = 2'-O-methylguanosine-3'-phosphate
  modified_base 21: mod_base = OTHER; note = 2'-O-methylguanosine-3'-phosphorothioate
  modified_base 22: mod_base = OTHER; note = 2'-O-methyladenosine-3'-phosphorothioate
  modified_base 23: mod_base = OTHER; note = 2'-O-methylguanosine
tagcaagctctggaactcaggag

SEQ ID NO: 405 - RNA, 23 nt, synthetic construct
  source 1..23: mol_type = other RNA
  modified_base 1: mod_base = OTHER; note = 2'-O-methyluridine-3'-phosphorothioate 5'-(E)-Vinylphosphonate
  modified_base 2: mod_base = OTHER; note = 2'-deoxy-2'-fluorouridine-3'-phosphorothioate
  modified_base 3: mod_base = OTHER; note = 2'-O-methylguanosine-3'-phosphate
  modified_base 4: mod_base = OTHER; note = 2'-O-methyluridine-3'-phosphate
  modified_base 5: mod_base = OTHER; note = 2'-O-methyladenosine-3'-phosphate
  modified_base 6: mod_base = OTHER; note = 2'-O-methylguanosine-3'-phosphate
  modified_base 7: mod_base = OTHER; note = cytidine-2'-phosphate
  modified_base 8: mod_base = OTHER; note = 2'-O-methyladenosine-3'-phosphate
  modified_base 9: mod_base = OTHER; note = 2'-O-methyladenosine-3'-phosphate
  modified_base 10: mod_base = OTHER; note = 2'-O-methylguanosine-3'-phosphate
  modified_base 11: mod_base = OTHER; note = 2'-O-methylcytidine-3'-phosphate
  modified_base 12: mod_base = OTHER; note = 2'-O-methyluridine-3'-phosphate
  modified_base 13: mod_base = OTHER; note = 2'-O-methylcytidine-3'-phosphate
  modified_base 14: mod_base = OTHER; note = 2'-deoxy-2'-fluorouridine-3'-phosphate
  modified_base 15: mod_base = OTHER; note = 2'-O-methylguanosine-3'-phosphate
  modified_base 16: mod_base = OTHER; note = 2'-deoxy-2'-fluoroguanosine-3'-phosphate
  modified_base 17: mod_base = OTHER; note = 2'-O-methyladenosine-3'-phosphate
  modified_base 18: mod_base = OTHER; note = 2'-O-methyladenosine-3'-phosphate
  modified_base 19: mod_base = OTHER; note = 2'-O-methylcytidine-3'-phosphate
  modified_base 20: mod_base = OTHER; note = 2'-O-methyluridine-3'-phosphate
  modified_base 21: mod_base = OTHER; note = 2'-O-methylcytidine-3'-phosphorothioate
  modified_base 22: mod_base = OTHER; note = 2'-O-methyladenosine-3'-phosphorothioate
  modified_base 23: mod_base = OTHER; note = 2'-O-methylguanosine
ttgtagcaagctctggaactcag

SEQ ID NO: 406 - RNA, 23 nt, synthetic construct
  source 1..23: mol_type = other RNA
  modified_base 1: mod_base = OTHER; note = 2'-O-methyluridine-3'-phosphorothioate 5'-(E)-Vinylphosphonate
  modified_base 2: mod_base = OTHER; note = 2'-deoxy-2'-fluorocytidine-3'-phosphorothioate
  modified_base 3: mod_base = OTHER; note = 2'-O-methyluridine-3'-phosphate
  modified_base 4: mod_base = OTHER; note = 2'-O-methylguanosine-3'-phosphate
  modified_base 5: mod_base = OTHER; note = 2'-O-methyluridine-3'-phosphate
  modified_base 6: mod_base = OTHER; note = 2'-O-methyladenosine-3'-phosphate
  modified_base 7: mod_base = OTHER; note = guanosine-2'-phosphate
  modified_base 8: mod_base = OTHER; note = 2'-O-methylcytidine-3'-phosphate
  modified_base 9: mod_base = OTHER; note = 2'-O-methyladenosine-3'-phosphate
  modified_base 10: mod_base = OTHER; note = 2'-O-methyladenosine-3'-phosphate
  modified_base 11: mod_base = OTHER; note = 2'-O-methylguanosine-3'-phosphate
  modified_base 12: mod_base = OTHER; note = 2'-O-methylcytidine-3'-phosphate
  modified_base 13: mod_base = OTHER; note = 2'-O-methyluridine-3'-phosphate
  modified_base 14: mod_base = OTHER; note = 2'-deoxy-2'-fluorocytidine-3'-phosphate
  modified_base 15: mod_base = OTHER; note = 2'-O-methyluridine-3'-phosphate
  modified_base 16: mod_base = OTHER; note = 2'-deoxy-2'-fluoroguanosine-3'-phosphate
  modified_base 17: mod_base = OTHER; note = 2'-O-methylguanosine-3'-phosphate
  modified_base 18: mod_base = OTHER; note = 2'-O-methyladenosine-3'-phosphate
  modified_base 19: mod_base = OTHER; note = 2'-O-methyladenosine-3'-phosphate
  modified_base 20: mod_base = OTHER; note = 2'-O-methylcytidine-3'-phosphate
  modified_base 21: mod_base = OTHER; note = 2'-O-methyluridine-3'-phosphorothioate
  modified_base 22: mod_base = OTHER; note = 2'-O-methylcytidine-3'-phosphorothioate
  modified_base 23: mod_base = OTHER; note = 2'-O-methyladenosine
tctgtagcaagctctggaactca

SEQ ID NO: 407 - RNA, 23 nt, synthetic construct
  source 1..23: mol_type = other RNA
  modified_base 1: mod_base = OTHER; note = 2'-O-methyluridine-3'-phosphorothioate 5'-(E)-Vinylphosphonate
  modified_base 2: mod_base = OTHER; note = 2'-deoxy-2'-fluorocytidine-3'-phosphorothioate
  modified_base 3: mod_base = OTHER; note = 2'-O-methylcytidine-3'-phosphate
  modified_base 4: mod_base = OTHER; note = 2'-O-methyluridine-3'-phosphate
  modified_base 5: mod_base = OTHER; note = 2'-O-methylguanosine-3'-phosphate
  modified_base 6: mod_base = OTHER; note = 2'-deoxy-2'-fluorouridine-3'-phosphate
  modified_base 7: mod_base = OTHER; note = 2'-O-methyladenosine-3'-phosphate
  modified_base 8: mod_base = OTHER; note = 2'-deoxy-2'-fluoroguanosine-3'-phosphate
  modified_base 9: mod_base = OTHER; note = 2'-deoxy-2'-fluorocytidine-3'-phosphate
  modified_base 10: mod_base = OTHER; note = 2'-O-methyladenosine-3'-phosphate
  modified_base 11: mod_base = OTHER; note = 2'-O-methyladenosine-3'-phosphate
  modified_base 12: mod_base = OTHER; note = 2'-O-methylguanosine-3'-phosphate
  modified_base 13: mod_base = OTHER; note = 2'-O-methylcytidine-3'-phosphate
  modified_base 14: mod_base = OTHER; note = 2'-deoxy-2'-fluorouridine-3'-phosphate
  modified_base 15: mod_base = OTHER; note = 2'-O-methylcytidine-3'-phosphate
  modified_base 16: mod_base = OTHER; note = 2'-deoxy-2'-fluorouridine-3'-phosphate
  modified_base 17: mod_base = OTHER; note = 2'-O-methylguanosine-3'-phosphate
  modified_base 18: mod_base = OTHER; note = 2'-O-methylguanosine-3'-phosphate
  modified_base 19: mod_base = OTHER; note = 2'-O-methyladenosine-3'-phosphate
  modified_base 20: mod_base = OTHER; note = 2'-O-methyladenosine-3'-phosphate
  modified_base 21: mod_base = OTHER; note = 2'-O-methylcytidine-3'-phosphorothioate
  modified_base 22: mod_base = OTHER; note = 2'-O-methyluridine-3'-phosphorothioate
  modified_base 23: mod_base = OTHER; note = 2'-O-methylcytidine
tcctgtagcaagctctggaactc

SEQ ID NO: 408 - RNA, 23 nt, synthetic construct
  source 1..23: mol_type = other RNA
  modified_base 1: mod_base = OTHER; note = 2'-O-methyluridine-3'-phosphorothioate 5'-(E)-Vinylphosphonate
  modified_base 2: mod_base = OTHER; note = 2'-deoxy-2'-fluoroguanosine-3'-phosphorothioate
  modified_base 3: mod_base = OTHER; note = 2'-O-methylcytidine-3'-phosphate
  modified_base 4: mod_base = OTHER; note = 2'-O-methylcytidine-3'-phosphate
  modified_base 5: mod_base = OTHER; note = 2'-O-methyluridine-3'-phosphate
  modified_base 6: mod_base = OTHER; note = 2'-O-methylguanosine-3'-phosphate
  modified_base 7: mod_base = OTHER; note = Thymidine-glycol nucleic acid (GNA), S-Isomer
  modified_base 8: mod_base = OTHER; note = 2'-O-methyladenosine-3'-phosphate
  modified_base 9: mod_base = OTHER; note = 2'-O-methylguanosine-3'-phosphate
  modified_base 10: mod_base = OTHER; note = 2'-O-methylcytidine-3'-phosphate
  modified_base 11: mod_base = OTHER; note = 2'-O-methyladenosine-3'-phosphate
  modified_base 12: mod_base = OTHER; note = 2'-O-methyladenosine-3'-phosphate
  modified_base 13: mod_base = OTHER; note = 2'-O-methylguanosine-3'-phosphate
  modified_base 14: mod_base = OTHER; note = 2'-deoxy-2'-fluorocytidine-3'-phosphate
  modified_base 15: mod_base = OTHER; note = 2'-O-methyluridine-3'-phosphate
  modified_base 16: mod_base = OTHER; note = 2'-deoxy-2'-fluorocytidine-3'-phosphate
  modified_base 17: mod_base = OTHER; note = 2'-O-methyluridine-3'-phosphate
  modified_base 18: mod_base = OTHER; note = 2'-O-methylguanosine-3'-phosphate
  modified_base 19: mod_base = OTHER; note = 2'-O-methylguanosine-3'-phosphate
  modified_base 20: mod_base = OTHER; note = 2'-O-methyladenosine-3'-phosphate
  modified_base 21: mod_base = OTHER; note = 2'-O-methyladenosine-3'-phosphorothioate
  modified_base 22: mod_base = OTHER; note = 2'-O-methylcytidine-3'-phosphorothioate
  modified_base 23: mod_base = OTHER; note = 2'-O-methyluridine
tgcctgtagcaagctctggaact

SEQ ID NO: 409 - RNA, 23 nt, synthetic construct
  source 1..23: mol_type = other RNA
  modified_base 1: mod_base = OTHER; note = 2'-O-methyluridine-3'-phosphorothioate 5'-(E)-Vinylphosphonate
  modified_base 2: mod_base = OTHER; note = 2'-deoxy-2'-fluoroadenosine-3'-phosphorothioate
  modified_base 3: mod_base = OTHER; note = 2'-O-methylguanosine-3'-phosphate
  modified_base 4: mod_base = OTHER; note = 2'-O-methylcytidine-3'-phosphate
  modified_base 5: mod_base = OTHER; note = 2'-O-methylcytidine-3'-phosphate
  modified_base 6: mod_base = OTHER; note = 2'-O-methyluridine-3'-phosphate
  modified_base 7: mod_base = OTHER; note = guanosine-2'-phosphate
  modified_base 8: mod_base = OTHER; note = 2'-O-methyluridine-3'-phosphate
  modified_base 9: mod_base = OTHER; note = 2'-O-methyladenosine-3'-phosphate
  modified_base 10: mod_base = OTHER; note = 2'-O-methylguanosine-3'-phosphate
  modified_base 11: mod_base = OTHER; note = 2'-O-methylcytidine-3'-phosphate
  modified_base 12: mod_base = OTHER; note = 2'-O-methyladenosine-3'-phosphate
  modified_base 13: mod_base = OTHER; note = 2'-O-methyladenosine-3'-phosphate
  modified_base 14: mod_base = OTHER; note = 2'-deoxy-2'-fluoroguanosine-3'-phosphate
  modified_base 15: mod_base = OTHER; note = 2'-O-methylcytidine-3'-phosphate
  modified_base 16: mod_base = OTHER; note = 2'-deoxy-2'-fluorouridine-3'-phosphate
  modified_base 17: mod_base = OTHER; note = 2'-O-methylcytidine-3'-phosphate
  modified_base 18: mod_base = OTHER; note = 2'-O-methyluridine-3'-phosphate
  modified_base 19: mod_base = OTHER; note = 2'-O-methylguanosine-3'-phosphate
  modified_base 20: mod_base = OTHER; note = 2'-O-methylguanosine-3'-phosphate
  modified_base 21: mod_base = OTHER; note = 2'-O-methyladenosine-3'-phosphorothioate
  modified_base 22: mod_base = OTHER; note = 2'-O-methyladenosine-3'-phosphorothioate
  modified_base 23: mod_base = OTHER; note = 2'-O-methylcytidine
tagcctgtagcaagctctggaac

SEQ ID NO: 410 - RNA, 23 nt, synthetic construct
  source 1..23: mol_type = other RNA
  modified_base 1: mod_base = OTHER; note = 2'-O-methyluridine-3'-phosphorothioate 5'-(E)-Vinylphosphonate
  modified_base 2: mod_base = OTHER; note = 2'-deoxy-2'-fluorocytidine-3'-phosphorothioate
  modified_base 3: mod_base = OTHER; note = 2'-O-methyladenosine-3'-phosphate
  modified_base 4: mod_base = OTHER; note = 2'-O-methylguanosine-3'-phosphate
  modified_base 5: mod_base = OTHER; note = 2'-O-methylcytidine-3'-phosphate
  modified_base 6: mod_base = OTHER; note = 2'-O-methylcytidine-3'-phosphate
  modified_base 7: mod_base = OTHER; note = Thymidine-glycol nucleic acid (GNA), S-Isomer
  modified_base 8: mod_base = OTHER; note = 2'-O-methylguanosine-3'-phosphate
  modified_base 9: mod_base = OTHER; note = 2'-O-methyluridine-3'-phosphate
  modified_base 10: mod_base = OTHER; note = 2'-O-methyladenosine-3'-phosphate
  modified_base 11: mod_base = OTHER; note = 2'-O-methylguanosine-3'-phosphate
  modified_base 12: mod_base = OTHER; note = 2'-O-methylcytidine-3'-phosphate
  modified_base 13: mod_base = OTHER; note = 2'-O-methyladenosine-3'-phosphate
  modified_base 14: mod_base = OTHER; note = 2'-deoxy-2'-fluoroadenosine-3'-phosphate
  modified_base 15: mod_base = OTHER; note = 2'-O-methylguanosine-3'-phosphate
  modified_base 16: mod_base = OTHER; note = 2'-deoxy-2'-fluorocytidine-3'-phosphate
  modified_base 17: mod_base = OTHER; note = 2'-O-methyluridine-3'-phosphate
  modified_base 18: mod_base = OTHER; note = 2'-O-methylcytidine-3'-phosphate
  modified_base 19: mod_base = OTHER; note = 2'-O-methyluridine-3'-phosphate
  modified_base 20: mod_base = OTHER; note = 2'-O-methylguanosine-3'-phosphate
  modified_base 21: mod_base = OTHER; note = 2'-O-methylguanosine-3'-phosphorothioate
  modified_base 22: mod_base = OTHER; note = 2'-O-methyladenosine-3'-phosphorothioate
  modified_base 23: mod_base = OTHER; note = 2'-O-methyladenosine
tcagcctgtagcaagctctggaa

SEQ ID NO: 411 - RNA, 23 nt, synthetic construct
  source 1..23: mol_type = other RNA
  modified_base 1: mod_base = OTHER; note = 2'-O-methyluridine-3'-phosphorothioate 5'-(E)-Vinylphosphonate
  modified_base 2: mod_base = OTHER; note = 2'-deoxy-2'-fluoroguanosine-3'-phosphorothioate
  modified_base 3: mod_base = OTHER; note = 2'-O-methylcytidine-3'-phosphate
  modified_base 4: mod_base = OTHER; note = 2'-O-methyladenosine-3'-phosphate
  modified_base 5: mod_base = OTHER; note = 2'-O-methylguanosine-3'-phosphate
  modified_base 6: mod_base = OTHER; note = 2'-O-methylcytidine-3'-phosphate
  modified_base 7: mod_base = OTHER; note = cytidine-2'-phosphate
  modified_base 8: mod_base = OTHER; note = 2'-O-methyluridine-3'-phosphate
  modified_base 9: mod_base = OTHER; note = 2'-O-methylguanosine-3'-phosphate
  modified_base 10: mod_base = OTHER; note = 2'-O-methyluridine-3'-phosphate
  modified_base 11: mod_base = OTHER; note = 2'-O-methyladenosine-3'-phosphate
  modified_base 12: mod_base = OTHER; note = 2'-O-methylguanosine-3'-phosphate
  modified_base 13: mod_base = OTHER; note = 2'-O-methylcytidine-3'-phosphate
  modified_base 14: mod_base = OTHER; note = 2'-deoxy-2'-fluoroadenosine-3'-phosphate
  modified_base 15: mod_base = OTHER; note = 2'-O-methyladenosine-3'-phosphate
  modified_base 16: mod_base = OTHER; note = 2'-deoxy-2'-fluoroguanosine-3'-phosphate
  modified_base 17: mod_base = OTHER; note = 2'-O-methylcytidine-3'-phosphate
  modified_base 18: mod_base = OTHER; note = 2'-O-methyluridine-3'-phosphate
  modified_base 19: mod_base = OTHER; note = 2'-O-methylcytidine-3'-phosphate
  modified_base 20: mod_base = OTHER; note = 2'-O-methyluridine-3'-phosphate
  modified_base 21: mod_base = OTHER; note = 2'-O-methylguanosine-3'-phosphorothioate
  modified_base 22: mod_base = OTHER; note = 2'-O-methylguanosine-3'-phosphorothioate
  modified_base 23: mod_base = OTHER; note = 2'-O-methyladenosine
tgcagcctgtagcaagctctgga

SEQ ID NO: 412 - RNA, 23 nt, synthetic construct
  source 1..23: mol_type = other RNA
  modified_base 1: mod_base = OTHER; note = 2'-O-methyluridine-3'-phosphorothioate 5'-(E)-Vinylphosphonate
  modified_base 2: mod_base = OTHER; note = 2'-deoxy-2'-fluoroguanosine-3'-phosphorothioate
  modified_base 3: mod_base = OTHER; note = 2'-O-methylguanosine-3'-phosphate
  modified_base 4: mod_base = OTHER; note = 2'-O-methyladenosine-3'-phosphate
  modified_base 5: mod_base = OTHER; note = 2'-O-methyladenosine-3'-phosphate
  modified_base 6: mod_base = OTHER; note = 2'-O-methyladenosine-3'-phosphate
  modified_base 7: mod_base = OTHER; note = cytidine-2'-phosphate
  modified_base 8: mod_base = OTHER; note = 2'-O-methyladenosine-3'-phosphate
  modified_base 9: mod_base = OTHER; note = 2'-O-methyladenosine-3'-phosphate
  modified_base 10: mod_base = OTHER; note = 2'-O-methylcytidine-3'-phosphate
  modified_base 11: mod_base = OTHER; note = 2'-O-methylcytidine-3'-phosphate
  modified_base 12: mod_base = OTHER; note = 2'-O-methylguanosine-3'-phosphate
  modified_base 13: mod_base = OTHER; note = 2'-O-methylcytidine-3'-phosphate
  modified_base 14: mod_base = OTHER; note = 2'-deoxy-2'-fluoroadenosine-3'-phosphate
  modified_base 15: mod_base = OTHER; note = 2'-O-methylguanosine-3'-phosphate
  modified_base 16: mod_base = OTHER; note = 2'-deoxy-2'-fluorocytidine-3'-phosphate
  modified_base 17: mod_base = OTHER; note = 2'-O-methylcytidine-3'-phosphate
  modified_base 18: mod_base = OTHER; note = 2'-O-methyluridine-3'-phosphate
  modified_base 19: mod_base = OTHER; note = 2'-O-methylguanosine-3'-phosphate
  modified_base 20: mod_base = OTHER; note = 2'-O-methyluridine-3'-phosphate
  modified_base 21: mod_base = OTHER; note = 2'-O-methyladenosine-3'-phosphorothioate
  modified_base 22: mod_base = OTHER; note = 2'-O-methylguanosine-3'-phosphorothioate
  modified_base 23: mod_base = OTHER; note = 2'-O-methylcytidine
tggaaacaaccgcagcctgtagc

SEQ ID NO: 413 - RNA, 23 nt, synthetic construct
  source 1..23: mol_type = other RNA
  modified_base 1: mod_base = OTHER; note = 2'-O-methyluridine-3'-phosphorothioate 5'-(E)-Vinylphosphonate
  modified_base 2: mod_base = OTHER; note = 2'-deoxy-2'-fluoroadenosine-3'-phosphorothioate
  modified_base 3: mod_base = OTHER; note = 2'-O-methylguanosine-3'-phosphate
  modified_base 4: mod_base = OTHER; note = 2'-O-methylguanosine-3'-phosphate
  modified_base 5: mod_base = OTHER; note = 2'-O-methyladenosine-3'-phosphate
  modified_base 6: mod_base = OTHER; note = 2'-O-methylguanosine-3'-phosphate
  modified_base 7: mod_base = OTHER; note = guanosine-2'-phosphate
  modified_base 8: mod_base = OTHER; note = 2'-O-methylguanosine-3'-phosphate
  modified_base 9: mod_base = OTHER; note = 2'-O-methyladenosine-3'-phosphate
  modified_base 10: mod_base = OTHER; note = 2'-O-methyladenosine-3'-phosphate
  modified_base 11: mod_base = OTHER; note = 2'-O-methyladenosine-3'-phosphate
  modified_base 12: mod_base = OTHER; note = 2'-O-methylcytidine-3'-phosphate
  modified_base 13: mod_base = OTHER; note = 2'-O-methyladenosine-3'-phosphate
  modified_base 14: mod_base = OTHER; note = 2'-deoxy-2'-fluoroadenosine-3'-phosphate
  modified_base 15: mod_base = OTHER; note = 2'-O-methylcytidine-3'-phosphate
  modified_base 16: mod_base = OTHER; note = 2'-deoxy-2'-fluorocytidine-3'-phosphate
  modified_base 17: mod_base = OTHER; note = 2'-O-methylguanosine-3'-phosphate
  modified_base 18: mod_base = OTHER; note = 2'-O-methylcytidine-3'-phosphate
  modified_base 19: mod_base = OTHER; note = 2'-O-methyladenosine-3'-phosphate
  modified_base 20: mod_base = OTHER; note = 2'-O-methylguanosine-3'-phosphate
  modified_base 21: mod_base = OTHER; note = 2'-O-methylcytidine-3'-phosphorothioate
  modified_base 22: mod_base = OTHER; note = 2'-O-methylcytidine-3'-phosphorothioate
  modified_base 23: mod_base = OTHER; note = 2'-O-methyluridine
taggagggaaacaaccgcagcct

SEQ ID NO: 414 - RNA, 23 nt, synthetic construct
  source 1..23: mol_type = other RNA
  modified_base 1: mod_base = OTHER; note = 2'-O-methyluridine-3'-phosphorothioate 5'-(E)-Vinylphosphonate
  modified_base 2: mod_base = OTHER; note = 2'-deoxy-2'-fluoroadenosine-3'-phosphorothioate
  modified_base 3: mod_base = OTHER; note = 2'-O-methyladenosine-3'-phosphate
  modified_base 4: mod_base = OTHER; note = 2'-O-methylguanosine-3'-phosphate
  modified_base 5: mod_base = OTHER; note = 2'-O-methylguanosine-3'-phosphate
  modified_base 6: mod_base = OTHER; note = 2'-O-methyladenosine-3'-phosphate
  modified_base 7: mod_base = OTHER; note = guanosine-2'-phosphate
  modified_base 8: mod_base = OTHER; note = 2'-O-methylguanosine-3'-phosphate
  modified_base 9: mod_base = OTHER; note = 2'-O-methylguanosine-3'-phosphate
  modified_base 10: mod_base = OTHER; note = 2'-O-methyladenosine-3'-phosphate
  modified_base 11: mod_base = OTHER; note = 2'-O-methyladenosine-3'-phosphate
  modified_base 12: mod_base = OTHER; note = 2'-O-methyladenosine-3'-phosphate
  modified_base 13: mod_base = OTHER; note = 2'-O-methylcytidine-3'-phosphate
  modified_base 14: mod_base = OTHER; note = 2'-deoxy-2'-fluoroadenosine-3'-phosphate
  modified_base 15: mod_base = OTHER; note = 2'-O-methyladenosine-3'-phosphate
  modified_base 16: mod_base = OTHER; note = 2'-deoxy-2'-fluorocytidine-3'-phosphate
  modified_base 17: mod_base = OTHER; note = 2'-O-methylcytidine-3'-phosphate
  modified_base 18: mod_base = OTHER; note = 2'-O-methylguanosine-3'-phosphate
  modified_base 19: mod_base = OTHER; note = 2'-O-methylcytidine-3'-phosphate
  modified_base 20: mod_base = OTHER; note = 2'-O-methyladenosine-3'-phosphate
  modified_base 21: mod_base = OTHER; note = 2'-O-methylguanosine-3'-phosphorothioate
  modified_base 22: mod_base = OTHER; note = 2'-O-methylcytidine-3'-phosphorothioate
  modified_base 23: mod_base = OTHER; note = 2'-O-methylcytidine
taaggagggaaacaaccgcagcc

SEQ ID NO: 415 - RNA, 23 nt, synthetic construct
  source 1..23: mol_type = other RNA
  modified_base 1: mod_base = OTHER; note = 2'-O-methyluridine-3'-phosphorothioate 5'-(E)-Vinylphosphonate
  modified_base 2: mod_base = OTHER; note = 2'-deoxy-2'-fluoroadenosine-3'-phosphorothioate
  modified_base 3: mod_base = OTHER; note = 2'-O-methylcytidine-3'-phosphate
  modified_base 4: mod_base = OTHER; note = 2'-O-methyladenosine-3'-phosphate
  modified_base 5: mod_base = OTHER; note = 2'-O-methyladenosine-3'-phosphate
  modified_base 6: mod_base = OTHER; note = 2'-O-methylguanosine-3'-phosphate
  modified_base 7: mod_base = OTHER; note = guanosine-2'-phosphate
  modified_base 8: mod_base = OTHER; note = 2'-O-methyladenosine-3'-phosphate
  modified_base 9: mod_base = OTHER; note = 2'-O-methylguanosine-3'-phosphate
  modified_base 10: mod_base = OTHER; note = 2'-O-methylguanosine-3'-phosphate
  modified_base 11: mod_base = OTHER; note = 2'-O-methylguanosine-3'-phosphate
  modified_base 12: mod_base = OTHER; note = 2'-O-methyladenosine-3'-phosphate
  modified_base 13: mod_base = OTHER; note = 2'-O-methyladenosine-3'-phosphate
  modified_base 14: mod_base = OTHER; note = 2'-deoxy-2'-fluoroadenosine-3'-phosphate
  modified_base 15: mod_base = OTHER; note = 2'-O-methylcytidine-3'-phosphate
  modified_base 16: mod_base = OTHER; note = 2'-deoxy-2'-fluoroadenosine-3'-phosphate
  modified_base 17: mod_base = OTHER; note = 2'-O-methyladenosine-3'-phosphate
  modified_base 18: mod_base = OTHER; note = 2'-O-methylcytidine-3'-phosphate
  modified_base 19: mod_base = OTHER; note = 2'-O-methylcytidine-3'-phosphate
  modified_base 20: mod_base = OTHER; note = 2'-O-methylguanosine-3'-phosphate
  modified_base 21: mod_base = OTHER; note = 2'-O-methylcytidine-3'-phosphorothioate
  modified_base 22: mod_base = OTHER; note = 2'-O-methyladenosine-3'-phosphorothioate
  modified_base 23: mod_base = OTHER; note = 2'-O-methylguanosine
tacaaggagggaaacaaccgcag

SEQ ID NO: 416 - RNA, 23 nt, synthetic construct
  source 1..23: mol_type = other RNA
  modified_base 1: mod_base = OTHER; note = 2'-O-methyluridine-3'-phosphorothioate 5'-(E)-Vinylphosphonate
  modified_base 2: mod_base = OTHER; note = 2'-deoxy-2'-fluoroadenosine-3'-phosphorothioate
  modified_base 3: mod_base = OTHER; note = 2'-O-methyladenosine-3'-phosphate
  modified_base 4: mod_base = OTHER; note = 2'-O-methylcytidine-3'-phosphate
  modified_base 5: mod_base = OTHER; note = 2'-O-methyladenosine-3'-phosphate
  modified_base 6: mod_base = OTHER; note = 2'-deoxy-2'-fluoroadenosine-3'-phosphate
  modified_base 7: mod_base = OTHER; note = 2'-O-methylguanosine-3'-phosphate
  modified_base 8: mod_base = OTHER; note = 2'-deoxy-2'-fluoroguanosine-3'-phosphate
  modified_base 9: mod_base = OTHER; note = 2'-deoxy-2'-fluoroadenosine-3'-phosphate
  modified_base 10: mod_base = OTHER; note = 2'-O-methylguanosine-3'-phosphate
  modified_base 11: mod_base = OTHER; note = 2'-O-methylguanosine-3'-phosphate
  modified_base 12: mod_base = OTHER; note = 2'-O-methylguanosine-3'-phosphate
  modified_base 13: mod_base = OTHER; note = 2'-O-methyladenosine-3'-phosphate
  modified_base 14: mod_base = OTHER; note = 2'-deoxy-2'-fluoroadenosine-3'-phosphate
  modified_base 15: mod_base = OTHER; note = 2'-O-methyladenosine-3'-phosphate
  modified_base 16: mod_base = OTHER; note = 2'-deoxy-2'-fluorocytidine-3'-phosphate
  modified_base 17: mod_base = OTHER; note = 2'-O-methyladenosine-3'-phosphate
  modified_base 18: mod_base = OTHER; note = 2'-O-methyladenosine-3'-phosphate
  modified_base 19: mod_base = OTHER; note = 2'-O-methylcytidine-3'-phosphate
  modified_base 20: mod_base = OTHER; note = 2'-O-methylcytidine-3'-phosphate
  modified_base 21: mod_base = OTHER; note = 2'-O-methylguanosine-3'-phosphorothioate
  modified_base 22: mod_base = OTHER; note = 2'-O-methylcytidine-3'-phosphorothioate
  modified_base 23: mod_base = OTHER; note = 2'-O-methyladenosine
taacaaggagggaaacaaccgca

SEQ ID NO: 417 - RNA, 23 nt, synthetic construct
  source 1..23: mol_type = other RNA
  modified_base 1: mod_base = OTHER; note = 2'-O-methyluridine-3'-phosphorothioate 5'-(E)-Vinylphosphonate
  modified_base 2: mod_base = OTHER; note = 2'-deoxy-2'-fluoroadenosine-3'-phosphorothioate
  modified_base 3: mod_base = OTHER; note = 2'-O-methyladenosine-3'-phosphate
  modified_base 4: mod_base = OTHER; note = 2'-O-methyladenosine-3'-phosphate
  modified_base 5: mod_base = OTHER; note = 2'-O-methyladenosine-3'-phosphate
  modified_base 6: mod_base = OTHER; note = 2'-deoxy-2'-fluorocytidine-3'-phosphate
  modified_base 7: mod_base = OTHER; note = 2'-O-methyladenosine-3'-phosphate
  modified_base 8: mod_base = OTHER; note = 2'-deoxy-2'-fluoroadenosine-3'-phosphate
  modified_base 9: mod_base = OTHER; note = 2'-deoxy-2'-fluoroguanosine-3'-phosphate
  modified_base 10: mod_base = OTHER; note = 2'-O-methylguanosine-3'-phosphate
  modified_base 11: mod_base = OTHER; note = 2'-O-methyladenosine-3'-phosphate
  modified_base 12: mod_base = OTHER; note = 2'-O-methylguanosine-3'-phosphate
  modified_base 13: mod_base = OTHER; note = 2'-O-methylguanosine-3'-phosphate
  modified_base 14: mod_base = OTHER; note = 2'-deoxy-2'-fluoroguanosine-3'-phosphate
  modified_base 15: mod_base = OTHER; note = 2'-O-methyladenosine-3'-phosphate
  modified_base 16: mod_base = OTHER; note = 2'-deoxy-2'-fluoroadenosine-3'-phosphate
  modified_base 17: mod_base = OTHER; note = 2'-O-methyladenosine-3'-phosphate
  modified_base 18: mod_base = OTHER; note = 2'-O-methylcytidine-3'-phosphate
  modified_base 19: mod_base = OTHER; note = 2'-O-methyladenosine-3'-phosphate
  modified_base 20: mod_base = OTHER; note = 2'-O-methyladenosine-3'-phosphate
  modified_base 21: mod_base = OTHER; note = 2'-O-methylcytidine-3'-phosphorothioate
  modified_base 22: mod_base = OTHER; note = 2'-O-methylcytidine-3'-phosphorothioate
  modified_base 23: mod_base = OTHER; note = 2'-O-methylguanosine
taaaacaaggagggaaacaaccg

SEQ ID NO: 418 - RNA, 23 nt, synthetic construct
  source 1..23: mol_type = other RNA
  modified_base 1: mod_base = OTHER; note = 2'-O-methyluridine-3'-phosphorothioate 5'-(E)-Vinylphosphonate
  modified_base 2: mod_base = OTHER; note = 2'-deoxy-2'-fluoroguanosine-3'-phosphorothioate
  modified_base 3: mod_base = OTHER; note = 2'-O-methyladenosine-3'-phosphate
  modified_base 4: mod_base = OTHER; note = 2'-O-methyladenosine-3'-phosphate
  modified_base 5: mod_base = OTHER; note = 2'-O-methyladenosine-3'-phosphate
  modified_base 6: mod_base = OTHER; note = 2'-deoxy-2'-fluoroadenosine-3'-phosphate
  modified_base 7: mod_base = OTHER; note = 2'-O-methylcytidine-3'-phosphate
  modified_base 8: mod_base = OTHER; note = 2'-deoxy-2'-fluoroadenosine-3'-phosphate
  modified_base 9: mod_base = OTHER; note = 2'-deoxy-2'-fluoroadenosine-3'-phosphate
  modified_base 10: mod_base = OTHER; note = 2'-O-methylguanosine-3'-phosphate
  modified_base 11: mod_base = OTHER; note = 2'-O-methylguanosine-3'-phosphate
  modified_base 12: mod_base = OTHER; note = 2'-O-methyladenosine-3'-phosphate
  modified_base 13: mod_base = OTHER; note = 2'-O-methylguanosine-3'-phosphate
  modified_base 14: mod_base = OTHER; note = 2'-deoxy-2'-fluoroguanosine-3'-phosphate
  modified_base 15: mod_base = OTHER; note = 2'-O-methylguanosine-3'-phosphate
  modified_base 16: mod_base = OTHER; note = 2'-deoxy-2'-fluoroadenosine-3'-phosphate
  modified_base 17: mod_base = OTHER; note = 2'-O-methyladenosine-3'-phosphate
  modified_base 18: mod_base = OTHER; note = 2'-O-methyladenosine-3'-phosphate
  modified_base 19: mod_base = OTHER; note = 2'-O-methylcytidine-3'-phosphate
  modified_base 20: mod_base = OTHER; note = 2'-O-methyladenosine-3'-phosphate
  modified_base 21: mod_base = OTHER; note = 2'-O-methyladenosine-3'-phosphorothioate
  modified_base 22: mod_base = OTHER; note = 2'-O-methylcytidine-3'-phosphorothioate
  modified_base 23: mod_base = OTHER; note = 2'-O-methylcytidine
tgaaaacaaggagggaaacaacc

SEQ ID NO: 419 - RNA, 23 nt, synthetic construct
  source 1..23: mol_type = other RNA
  modified_base 1: mod_base = OTHER; note = 2'-O-methyluridine-3'-phosphorothioate 5'-(E)-Vinylphosphonate
  modified_base 2: mod_base = OTHER; note = 2'-deoxy-2'-fluoroadenosine-3'-phosphorothioate
  modified_base 3: mod_base = OTHER; note = 2'-O-methylguanosine-3'-phosphate
  modified_base 4: mod_base = OTHER; note = 2'-O-methyladenosine-3'-phosphate
  modified_base 5: mod_base = OTHER; note = 2'-O-methyladenosine-3'-phosphate
  modified_base 6: mod_base = OTHER; note = 2'-deoxy-2'-fluoroguanosine-3'-phosphate
  modified_base 7: mod_base = OTHER; note = 2'-O-methyladenosine-3'-phosphate
  modified_base 8: mod_base = OTHER; note = 2'-deoxy-2'-fluoroadenosine-3'-phosphate
  modified_base 9: mod_base = OTHER; note = 2'-deoxy-2'-fluoroadenosine-3'-phosphate
  modified_base 10: mod_base = OTHER; note = 2'-O-methyladenosine-3'-phosphate
  modified_base 11: mod_base = OTHER; note = 2'-O-methylcytidine-3'-phosphate
  modified_base 12: mod_base = OTHER; note = 2'-O-methyladenosine-3'-phosphate
  modified_base 13: mod_base = OTHER; note = 2'-O-methyladenosine-3'-phosphate
  modified_base 14: mod_base = OTHER; note = 2'-deoxy-2'-fluoroguanosine-3'-phosphate
  modified_base 15: mod_base = OTHER; note = 2'-O-methylguanosine-3'-phosphate
  modified_base 16: mod_base = OTHER; note = 2'-deoxy-2'-fluoroadenosine-3'-phosphate
  modified_base 17: mod_base = OTHER; note = 2'-O-methylguanosine-3'-phosphate
  modified_base 18: mod_base = OTHER; note = 2'-O-methylguanosine-3'-phosphate
  modified_base 19: mod_base = OTHER; note = 2'-O-methylguanosine-3'-phosphate
  modified_base 20: mod_base = OTHER; note = 2'-O-methyladenosine-3'-phosphate
  modified_base 21: mod_base = OTHER; note = 2'-O-methyladenosine-3'-phosphorothioate
  modified_base 22: mod_base = OTHER; note = 2'-O-methyladenosine-3'-phosphorothioate
  modified_base 23: mod_base = OTHER; note = 2'-O-methylcytidine
tagaagaaaacaaggagggaaac

SEQ ID NO: 420 - RNA, 23 nt, synthetic construct
  source 1..23: mol_type = other RNA
  modified_base 1: mod_base = OTHER; note = 2'-O-methyluridine-3'-phosphorothioate 5'-(E)-Vinylphosphonate
  modified_base 2: mod_base = OTHER; note = 2'-deoxy-2'-fluorocytidine-3'-phosphorothioate
  modified_base 3: mod_base = OTHER; note = 2'-O-methyladenosine-3'-phosphate
  modified_base 4: mod_base = OTHER; note = 2'-O-methylguanosine-3'-phosphate
  modified_base 5: mod_base = OTHER; note = 2'-O-methyladenosine-3'-phosphate
  modified_base 6: mod_base = OTHER; note = 2'-deoxy-2'-fluoroadenosine-3'-phosphate
  modified_base 7: mod_base = OTHER; note = 2'-O-methylguanosine-3'-phosphate
  modified_base 8: mod_base = OTHER; note = 2'-deoxy-2'-fluoroadenosine-3'-phosphate
  modified_base 9: mod_base = OTHER; note = 2'-deoxy-2'-fluoroadenosine-3'-phosphate
  modified_base 10: mod_base = OTHER; note = 2'-O-methyladenosine-3'-phosphate
  modified_base 11: mod_base = OTHER; note = 2'-O-methyladenosine-3'-phosphate
  modified_base 12: mod_base = OTHER; note = 2'-O-methylcytidine-3'-phosphate
  modified_base 13: mod_base = OTHER; note = 2'-O-methyladenosine-3'-phosphate
  modified_base 14: mod_base = OTHER; note = 2'-deoxy-2'-fluoroadenosine-3'-phosphate
  modified_base 15: mod_base = OTHER; note = 2'-O-methylguanosine-3'-phosphate
  modified_base 16: mod_base = OTHER; note = 2'-deoxy-2'-fluoroguanosine-3'-phosphate
  modified_base 17: mod_base = OTHER; note = 2'-O-methyladenosine-3'-phosphate
  modified_base 18: mod_base = OTHER; note = 2'-O-methylguanosine-3'-phosphate
  modified_base 19: mod_base = OTHER; note = 2'-O-methylguanosine-3'-phosphate
  modified_base 20: mod_base = OTHER; note = 2'-O-methylguanosine-3'-phosphate
  modified_base 21: mod_base = OTHER; note = 2'-O-methyladenosine-3'-phosphorothioate
  modified_base 22: mod_base = OTHER; note = 2'-O-methyladenosine-3'-phosphorothioate
  modified_base 23: mod_base = OTHER; note = 2'-O-methyladenosine
tcagaagaaaacaaggagggaaa

SEQ ID NO: 421 - RNA, 23 nt, synthetic construct
  source 1..23: mol_type = other RNA
  modified_base 1: mod_base = OTHER; note = 2'-O-methyluridine-3'-phosphorothioate 5'-(E)-Vinylphosphonate
  modified_base 2: mod_base = OTHER; note = 2'-deoxy-2'-fluorocytidine-3'-phosphorothioate
  modified_base 3: mod_base = OTHER; note = 2'-O-methylcytidine-3'-phosphate
  modified_base 4: mod_base = OTHER; note = 2'-O-methyladenosine-3'-phosphate
  modified_base 5: mod_base = OTHER; note = 2'-O-methylguanosine-3'-phosphate
  modified_base 6: mod_base = OTHER; note = 2'-deoxy-2'-fluoroadenosine-3'-phosphate
  modified_base 7: mod_base = OTHER; note = 2'-O-methyladenosine-3'-phosphate
  modified_base 8: mod_base = OTHER; note = 2'-deoxy-2'-fluoroguanosine-3'-phosphate
  modified_base 9: mod_base = OTHER; note = 2'-deoxy-2'-fluoroadenosine-3'-phosphate
  modified_base 10: mod_base = OTHER; note = 2'-O-methyladenosine-3'-phosphate
  modified_base 11: mod_base = OTHER; note = 2'-O-methyladenosine-3'-phosphate
  modified_base 12: mod_base = OTHER; note = 2'-O-methyladenosine-3'-phosphate
  modified_base 13: mod_base = OTHER; note = 2'-O-methylcytidine-3'-phosphate
  modified_base 14: mod_base = OTHER; note = 2'-deoxy-2'-fluoroadenosine-3'-phosphate
  modified_base 15: mod_base = OTHER; note = 2'-O-methyladenosine-3'-phosphate
  modified_base 16: mod_base = OTHER; note = 2'-deoxy-2'-fluoroguanosine-3'-phosphate
  modified_base 17: mod_base = OTHER; note = 2'-O-methylguanosine-3'-phosphate
  modified_base 18: mod_base = OTHER; note = 2'-O-methyladenosine-3'-phosphate
  modified_base 19: mod_base = OTHER; note = 2'-O-methylguanosine-3'-phosphate
  modified_base 20: mod_base = OTHER; note = 2'-O-methylguanosine-3'-phosphate
  modified_base 21: mod_base = OTHER; note = 2'-O-methylguanosine-3'-phosphorothioate
  modified_base 22: mod_base = OTHER; note = 2'-O-methyladenosine-3'-phosphorothioate
  modified_base 23: mod_base = OTHER; note = 2'-O-methyladenosine
tccagaagaaaacaaggagggaa

SEQ ID NO: 422 - RNA, 23 nt, synthetic construct
  source 1..23: mol_type = other RNA
  modified_base 1: mod_base = OTHER; note = 2'-O-methyluridine-3'-phosphorothioate 5'-(E)-Vinylphosphonate
  modified_base 2: mod_base = OTHER; note = 2'-deoxy-2'-fluoroadenosine-3'-phosphorothioate
  modified_base 3: mod_base = OTHER; note = 2'-O-methylcytidine-3'-phosphate
  modified_base 4: mod_base = OTHER; note = 2'-O-methylcytidine-3'-phosphate
  modified_base 5: mod_base = OTHER; note = 2'-O-methyladenosine-3'-phosphate
  modified_base 6: mod_base = OTHER; note = 2'-deoxy-2'-fluoroguanosine-3'-phosphate
  modified_base 7: mod_base = OTHER; note = 2'-O-methyladenosine-3'-phosphate
  modified_base 8: mod_base = OTHER; note = 2'-deoxy-2'-fluoroadenosine-3'-phosphate
  modified_base 9: mod_base = OTHER; note = 2'-deoxy-2'-fluoroguanosine-3'-phosphate
  modified_base 10: mod_base = OTHER; note = 2'-O-methyladenosine-3'-phosphate
  modified_base 11: mod_base = OTHER; note = 2'-O-methyladenosine-3'-phosphate
  modified_base 12: mod_base = OTHER; note = 2'-O-methyladenosine-3'-phosphate
  modified_base 13: mod_base = OTHER; note = 2'-O-methyladenosine-3'-phosphate
  modified_base 14: mod_base = OTHER; note = 2'-deoxy-2'-fluorocytidine-3'-phosphate
  modified_base 15: mod_base = OTHER; note = 2'-O-methyladenosine-3'-phosphate
  modified_base 16: mod_base = OTHER; note = 2'-deoxy-2'-fluoroadenosine-3'-phosphate
  modified_base 17: mod_base = OTHER; note = 2'-O-methylguanosine-3'-phosphate
  modified_base 18: mod_base = OTHER; note = 2'-O-methylguanosine-3'-phosphate
  modified_base 19: mod_base = OTHER; note = 2'-O-methyladenosine-3'-phosphate
  modified_base 20: mod_base = OTHER; note = 2'-O-methylguanosine-3'-phosphate
  modified_base 21: mod_base = OTHER; note = 2'-O-methylguanosine-3'-phosphorothioate
  modified_base 22: mod_base = OTHER; note = 2'-O-methylguanosine-3'-phosphorothioate
  modified_base 23: mod_base = OTHER; note = 2'-O-methyladenosine
taccagaagaaaacaaggaggga

SEQ ID NO: 423 - RNA, 23 nt, synthetic construct
  source 1..23: mol_type = other RNA
  modified_base 1: mod_base = OTHER; note = 2'-O-methyluridine-3'-phosphorothioate 5'-(E)-Vinylphosphonate
  modified_base 2: mod_base = OTHER; note = 2'-deoxy-2'-fluoroadenosine-3'-phosphorothioate
  modified_base 3: mod_base = OTHER; note = 2'-O-methyladenosine-3'-phosphate
  modified_base 4: mod_base = OTHER; note = 2'-O-methylcytidine-3'-phosphate
  modified_base 5: mod_base = OTHER; note = 2'-O-methylcytidine-3'-phosphate
  modified_base 6: mod_base = OTHER; note = 2'-deoxy-2'-fluoroadenosine-3'-phosphate
  modified_base 7: mod_base = OTHER; note = 2'-O-methylguanosine-3'-phosphate
  modified_base 8: mod_base = OTHER; note = 2'-deoxy-2'-fluoroadenosine-3'-phosphate
  modified_base 9: mod_base = OTHER; note = 2'-deoxy-2'-fluoroadenosine-3'-phosphate
  modified_base 10: mod_base = OTHER; note = 2'-O-methylguanosine-3'-phosphate
  modified_base 11: mod_base = OTHER; note = 2'-O-methyladenosine-3'-phosphate
  modified_base 12: mod_base = OTHER; note = 2'-O-methyladenosine-3'-phosphate
  modified_base 13: mod_base = OTHER; note = 2'-O-methyladenosine-3'-phosphate
  modified_base 14: mod_base = OTHER; note = 2'-deoxy-2'-fluoroadenosine-3'-phosphate
  modified_base 15: mod_base = OTHER; note = 2'-O-methylcytidine-3'-phosphate
  modified_base 16: mod_base = OTHER; note = 2'-deoxy-2'-fluoroadenosine-3'-phosphate
  modified_base 17: mod_base = OTHER; note = 2'-O-methyladenosine-3'-phosphate
  modified_base 18: mod_base = OTHER; note = 2'-O-methylguanosine-3'-phosphate
  modified_base 19: mod_base = OTHER; note = 2'-O-methylguanosine-3'-phosphate
  modified_base 20: mod_base = OTHER; note = 2'-O-methyladenosine-3'-phosphate
  modified_base 21: mod_base = OTHER; note = 2'-O-methylguanosine-3'-phosphorothioate
  modified_base 22: mod_base = OTHER; note = 2'-O-methylguanosine-3'-phosphorothioate
  modified_base 23: mod_base = OTHER; note = 2'-O-methylguanosine
taaccagaagaaaacaaggaggg

SEQ ID NO: 424 - RNA, 23 nt, synthetic construct
  source 1..23: mol_type = other RNA
  modified_base 1: mod_base = OTHER; note = 2'-O-methyluridine-3'-phosphorothioate 5'-(E)-Vinylphosphonate
  modified_base 2: mod_base = OTHER; note = 2'-deoxy-2'-fluorouridine-3'-phosphorothioate
  modified_base 3: mod_base = OTHER; note = 2'-O-methyluridine-3'-phosphate
  modified_base 4: mod_base = OTHER; note = 2'-O-methyladenosine-3'-phosphate
  modified_base 5: mod_base = OTHER; note = 2'-O-methyladenosine-3'-phosphate
  modified_base 6: mod_base = OTHER; note = 2'-O-methylcytidine-3'-phosphate
  modified_base 7: mod_base = OTHER; note = cytidine-2'-phosphate
  modified_base 8: mod_base = OTHER; note = 2'-O-methyladenosine-3'-phosphate
  modified_base 9: mod_base = OTHER; note = 2'-O-methylguanosine-3'-phosphate
  modified_base 10: mod_base = OTHER; note = 2'-O-methyladenosine-3'-phosphate
  modified_base 11: mod_base = OTHER; note = 2'-O-methyladenosine-3'-phosphate
  modified_base 12: mod_base = OTHER; note = 2'-O-methylguanosine-3'-phosphate
  modified_base 13: mod_base = OTHER; note = 2'-O-methyladenosine-3'-phosphate
  modified_base 14: mod_base = OTHER; note = 2'-deoxy-2'-fluoroadenosine-3'-phosphate
  modified_base 15: mod_base = OTHER; note = 2'-O-methyladenosine-3'-phosphate
  modified_base 16: mod_base = OTHER; note = 2'-deoxy-2'-fluoroadenosine-3'-phosphate
  modified_base 17: mod_base = OTHER; note = 2'-O-methylcytidine-3'-phosphate
  modified_base 18: mod_base = OTHER; note = 2'-O-methyladenosine-3'-phosphate
  modified_base 19: mod_base = OTHER; note = 2'-O-methyladenosine-3'-phosphate
  modified_base 20: mod_base = OTHER; note = 2'-O-methylguanosine-3'-phosphate
  modified_base 21: mod_base = OTHER; note = 2'-O-methylguanosine-3'-phosphorothioate
  modified_base 22: mod_base = OTHER; note = 2'-O-methyladenosine-3'-phosphorothioate
  modified_base 23: mod_base = OTHER; note = 2'-O-methylguanosine
tttaaccagaagaaaacaaggag

SEQ ID NO: 425 - RNA, 23 nt, synthetic construct
  source 1..23: mol_type = other RNA
  modified_base 1: mod_base = OTHER; note = 2'-O-methyluridine-3'-phosphorothioate 5'-(E)-Vinylphosphonate
  modified_base 2: mod_base = OTHER; note = 2'-deoxy-2'-fluoroadenosine-3'-phosphorothioate
  modified_base 3: mod_base = OTHER; note = 2'-O-methyluridine-3'-phosphate
  modified_base 4: mod_base = OTHER; note = 2'-O-methyluridine-3'-phosphate
  modified_base 5: mod_base = OTHER; note = 2'-O-methyladenosine-3'-phosphate
  modified_base 6: mod_base = OTHER; note = 2'-deoxy-2'-fluoroadenosine-3'-phosphate
  modified_base 7: mod_base = OTHER; note = 2'-O-methylcytidine-3'-phosphate
  modified_base 8: mod_base = OTHER; note = 2'-deoxy-2'-fluorocytidine-3'-phosphate
  modified_base 9: mod_base = OTHER; note = 2'-deoxy-2'-fluoroadenosine-3'-phosphate
  modified_base 10: mod_base = OTHER; note = 2'-O-methylguanosine-3'-phosphate
  modified_base 11: mod_base = OTHER; note = 2'-O-methyladenosine-3'-phosphate
  modified_base 12: mod_base = OTHER; note = 2'-O-methyladenosine-3'-phosphate
  modified_base 13: mod_base = OTHER; note = 2'-O-methylguanosine-3'-phosphate
  modified_base 14: mod_base = OTHER; note = 2'-deoxy-2'-fluoroadenosine-3'-phosphate
  modified_base 15: mod_base = OTHER; note = 2'-O-methyladenosine-3'-phosphate
  modified_base 16: mod_base = OTHER; note = 2'-deoxy-2'-fluoroadenosine-3'-phosphate
  modified_base 17: mod_base = OTHER; note = 2'-O-methyladenosine-3'-phosphate
  modified_base 18: mod_base = OTHER; note = 2'-O-methylcytidine-3'-phosphate
  modified_base 19: mod_base = OTHER; note = 2'-O-methyladenosine-3'-phosphate
  modified_base 20: mod_base = OTHER; note = 2'-O-methyladenosine-3'-phosphate
  modified_base 21: mod_base = OTHER; note = 2'-O-methylguanosine-3'-phosphorothioate
  modified_base 22: mod_base = OTHER; note = 2'-O-methylguanosine-3'-phosphorothioate
  modified_base 23: mod_base = OTHER; note = 2'-O-methyladenosine
tattaaccagaagaaaacaagga

SEQ ID NO: 426 - RNA, 23 nt, synthetic construct
  source 1..23: mol_type = other RNA
  modified_base 1: mod_base = OTHER; note = 2'-O-methyluridine-3'-phosphorothioate 5'-(E)-Vinylphosphonate
  modified_base 2: mod_base = OTHER; note = 2'-deoxy-2'-fluoroguanosine-3'-phosphorothioate
  modified_base 3: mod_base = OTHER; note = 2'-O-methyladenosine-3'-phosphate
  modified_base 4: mod_base = OTHER; note = 2'-O-methyluridine-3'-phosphate
  modified_base 5: mod_base = OTHER; note = 2'-O-methyluridine-3'-phosphate
  modified_base 6: mod_base = OTHER; note = 2'-deoxy-2'-fluoroadenosine-3'-phosphate
  modified_base 7: mod_base = OTHER; note = 2'-O-methyladenosine-3'-phosphate
  modified_base 8: mod_base = OTHER; note = 2'-deoxy-2'-fluorocytidine-3'-phosphate
  modified_base 9: mod_base = OTHER; note = 2'-deoxy-2'-fluorocytidine-3'-phosphate
  modified_base 10: mod_base = OTHER; note = 2'-O-methyladenosine-3'-phosphate
  modified_base 11: mod_base = OTHER; note = 2'-O-methylguanosine-3'-phosphate
  modified_base 12: mod_base = OTHER; note = 2'-O-methyladenosine-3'-phosphate
  modified_base 13: mod_base = OTHER; note = 2'-O-methyladenosine-3'-phosphate
  modified_base 14: mod_base = OTHER; note = 2'-deoxy-2'-fluoroguanosine-3'-phosphate
  modified_base 15: mod_base = OTHER; note = 2'-O-methyladenosine-3'-phosphate
  modified_base 16: mod_base = OTHER; note = 2'-deoxy-2'-fluoroadenosine-3'-phosphate
  modified_base 17: mod_base = OTHER; note = 2'-O-methyladenosine-3'-phosphate
  modified_base 18: mod_base = OTHER; note = 2'-O-methyladenosine-3'-phosphate
  modified_base 19: mod_base = OTHER; note = 2'-O-methylcytidine-3'-phosphate
  modified_base 20: mod_base = OTHER; note = 2'-O-methyladenosine-3'-phosphate
  modified_base 21: mod_base = OTHER; note = 2'-O-methyladenosine-3'-phosphorothioate
  modified_base 22: mod_base = OTHER; note = 2'-O-methylguanosine-3'-phosphorothioate
  modified_base 23: mod_base = OTHER; note = 2'-O-methylguanosine
tgattaaccagaagaaaacaagg

SEQ ID NO: 427 - RNA, 23 nt, synthetic construct
  source 1..23: mol_type = other RNA
  modified_base 1: mod_base = OTHER; note = 2'-O-methyluridine-3'-phosphorothioate 5'-(E)-Vinylphosphonate
  modified_base 2: mod_base = OTHER; note = 2'-deoxy-2'-fluoroadenosine-3'-phosphorothioate
  modified_base 3: mod_base = OTHER; note = 2'-O-methylguanosine-3'-phosphate
  modified_base 4: mod_base = OTHER; note = 2'-O-methyladenosine-3'-phosphate
  modified_base 5: mod_base = OTHER; note = 2'-O-methyluridine-3'-phosphate
  modified_base 6: mod_base = OTHER; note = 2'-deoxy-2'-fluorouridine-3'-phosphate
  modified_base 7: mod_base = OTHER; note = 2'-O-methyladenosine-3'-phosphate
  modified_base 8: mod_base = OTHER; note = 2'-deoxy-2'-fluoroadenosine-3'-phosphate
  modified_base 9: mod_base = OTHER; note = 2'-deoxy-2'-fluorocytidine-3'-phosphate
  modified_base 10: mod_base = OTHER; note = 2'-O-methylcytidine-3'-phosphate
  modified_base 11: mod_base = OTHER; note = 2'-O-methyladenosine-3'-phosphate
  modified_base 12: mod_base = OTHER; note = 2'-O-methylguanosine-3'-phosphate
  modified_base 13: mod_base = OTHER; note = 2'-O-methyladenosine-3'-phosphate
  modified_base 14: mod_base = OTHER; note = 2'-deoxy-2'-fluoroadenosine-3'-phosphate
  modified_base 15: mod_base = OTHER; note = 2'-O-methylguanosine-3'-phosphate
  modified_base 16: mod_base = OTHER; note = 2'-deoxy-2'-fluoroadenosine-3'-phosphate
  modified_base 17: mod_base = OTHER; note = 2'-O-methyladenosine-3'-phosphate
  modified_base 18: mod_base = OTHER; note = 2'-O-methyladenosine-3'-phosphate
  modified_base 19: mod_base = OTHER; note = 2'-O-methyladenosine-3'-phosphate
  modified_base 20: mod_base = OTHER; note = 2'-O-methylcytidine-3'-phosphate
  modified_base 21: mod_base = OTHER; note = 2'-O-methyladenosine-3'-phosphorothioate
  modified_base 22: mod_base = OTHER; note = 2'-O-methyladenosine-3'-phosphorothioate
  modified_base 23: mod_base = OTHER; note = 2'-O-methylguanosine
tagattaaccagaagaaaacaag

SEQ ID NO: 428 - RNA, 23 nt, synthetic construct
  source 1..23: mol_type = other RNA
  modified_base 1: mod_base = OTHER; note = 2'-O-methyluridine-3'-phosphorothioate 5'-(E)-Vinylphosphonate
  modified_base 2: mod_base = OTHER; note = 2'-deoxy-2'-fluoroadenosine-3'-phosphorothioate
  modified_base 3: mod_base = OTHER; note = 2'-O-methyladenosine-3'-phosphate
  modified_base 4: mod_base = OTHER; note = 2'-O-methylguanosine-3'-phosphate
  modified_base 5: mod_base = OTHER; note = 2'-O-methyladenosine-3'-phosphate
  modified_base 6: mod_base = OTHER; note = 2'-deoxy-2'-fluorouridine-3'-phosphate
  modified_base 7: mod_base = OTHER; note = 2'-O-methyluridine-3'-phosphate
  modified_base 8: mod_base = OTHER; note = 2'-deoxy-2'-fluoroadenosine-3'-phosphate
  modified_base 9: mod_base = OTHER; note = 2'-deoxy-2'-fluoroadenosine-3'-phosphate
  modified_base 10: mod_base = OTHER; note = 2'-O-methylcytidine-3'-phosphate
  modified_base 11: mod_base = OTHER; note = 2'-O-methylcytidine-3'-phosphate
  modified_base 12: mod_base = OTHER; note = 2'-O-methyladenosine-3'-phosphate
  modified_base 13: mod_base = OTHER; note = 2'-O-methylguanosine-3'-phosphate
  modified_base 14: mod_base = OTHER; note = 2'-deoxy-2'-fluoroadenosine-3'-phosphate
  modified_base 15: mod_base = OTHER; note = 2'-O-methyladenosine-3'-phosphate
  modified_base 16: mod_base = OTHER; note = 2'-deoxy-2'-fluoroguanosine-3'-phosphate
  modified_base 17: mod_base = OTHER; note = 2'-O-methyladenosine-3'-phosphate
  modified_base 18: mod_base = OTHER; note = 2'-O-methyladenosine-3'-phosphate
  modified_base 19: mod_base = OTHER; note = 2'-O-methyladenosine-3'-phosphate
  modified_base 20: mod_base = OTHER; note = 2'-O-methyladenosine-3'-phosphate
  modified_base 21: mod_base = OTHER; note = 2'-O-methylcytidine-3'-phosphorothioate
  modified_base 22: mod_base = OTHER; note = 2'-O-methyladenosine-3'-phosphorothioate
  modified_base 23: mod_base = OTHER; note = 2'-O-methyladenosine
taagattaaccagaagaaaacaa

SEQ ID NO: 429 - RNA, 23 nt, synthetic construct
  source 1..23: mol_type = other RNA
  modified_base 1: mod_base = OTHER; note = 2'-O-methyluridine-3'-phosphorothioate 5'-(E)-Vinylphosphonate
  modified_base 2: mod_base = OTHER; note = 2'-deoxy-2'-fluoroadenosine-3'-phosphorothioate
  modified_base 3: mod_base = OTHER; note = 2'-O-methyluridine-3'-phosphate
  modified_base 4: mod_base = OTHER; note = 2'-O-methyladenosine-3'-phosphate
  modified_base 5: mod_base = OTHER; note = 2'-O-methyladenosine-3'-phosphate
  modified_base 6: mod_base = OTHER; note = 2'-deoxy-2'-fluoroadenosine-3'-phosphate
  modified_base 7: mod_base = OTHER; note = 2'-O-methylguanosine-3'-phosphate
  modified_base 8: mod_base = OTHER; note = 2'-deoxy-2'-fluoroadenosine-3'-phosphate
  modified_base 9: mod_base = OTHER; note = 2'-deoxy-2'-fluorouridine-3'-phosphate
  modified_base 10: mod_base = OTHER; note = 2'-O-methyluridine-3'-phosphate
  modified_base 11: mod_base = OTHER; note = 2'-O-methyladenosine-3'-phosphate
  modified_base 12: mod_base = OTHER; note = 2'-O-methyladenosine-3'-phosphate
  modified_base 13: mod_base = OTHER; note = 2'-O-methylcytidine-3'-phosphate
  modified_base 14: mod_base = OTHER; note = 2'-deoxy-2'-fluorocytidine-3'-phosphate
  modified_base 15: mod_base = OTHER; note = 2'-O-methyladenosine-3'-phosphate
  modified_base 16: mod_base = OTHER; note = 2'-deoxy-2'-fluoroguanosine-3'-phosphate
  modified_base 17: mod_base = OTHER; note = 2'-O-methyladenosine-3'-phosphate
  modified_base 18: mod_base = OTHER; note = 2'-O-methyladenosine-3'-phosphate
  modified_base 19: mod_base = OTHER; note = 2'-O-methylguanosine-3'-phosphate
  modified_base 20: mod_base = OTHER; note = 2'-O-methyladenosine-3'-phosphate
  modified_base 21: mod_base = OTHER; note = 2'-O-methyladenosine-3'-phosphorothioate
  modified_base 22: mod_base = OTHER; note = 2'-O-methyladenosine-3'-phosphorothioate
  modified_base 23: mod_base = OTHER; note = 2'-O-methyladenosine
tataaagattaaccagaagaaaa

SEQ ID NO: 430 - RNA, 23 nt, synthetic construct
  source 1..23: mol_type = other RNA
  modified_base 1: mod_base = OTHER; note = 2'-O-methyluridine-3'-phosphorothioate 5'-(E)-Vinylphosphonate
  modified_base 2: mod_base = OTHER; note = 2'-deoxy-2'-fluoroguanosine-3'-phosphorothioate
  modified_base 3: mod_base = OTHER; note = 2'-O-methyladenosine-3'-phosphate
  modified_base 4: mod_base = OTHER; note = 2'-O-methyluridine-3'-phosphate
  modified_base 5: mod_base = OTHER; note = 2'-O-methyladenosine-3'-phosphate
  modified_base 6: mod_base = OTHER; note = 2'-deoxy-2'-fluoroadenosine-3'-phosphate
  modified_base 7: mod_base = OTHER; note = 2'-O-methyladenosine-3'-phosphate
  modified_base 8: mod_base = OTHER; note = 2'-deoxy-2'-fluoroguanosine-3'-phosphate
  modified_base 9: mod_base = OTHER; note = 2'-deoxy-2'-fluoroadenosine-3'-phosphate
  modified_base 10: mod_base = OTHER; note = 2'-O-methyluridine-3'-phosphate
  modified_base 11: mod_base = OTHER; note = 2'-O-methyluridine-3'-phosphate
  modified_base 12: mod_base = OTHER; note = 2'-O-methyladenosine-3'-phosphate
  modified_base 13: mod_base = OTHER; note = 2'-O-methyladenosine-3'-phosphate
  modified_base 14: mod_base = OTHER; note = 2'-deoxy-2'-fluorocytidine-3'-phosphate
  modified_base 15: mod_base = OTHER; note = 2'-O-methylcytidine-3'-phosphate
  modified_base 16: mod_base = OTHER; note = 2'-deoxy-2'-fluoroadenosine-3'-phosphate
  modified_base 17: mod_base = OTHER; note = 2'-O-methylguanosine-3'-phosphate
  modified_base 18: mod_base = OTHER; note = 2'-O-methyladenosine-3'-phosphate
  modified_base 19: mod_base = OTHER; note = 2'-O-methyladenosine-3'-phosphate
  modified_base 20: mod_base = OTHER; note = 2'-O-methylguanosine-3'-phosphate
  modified_base 21: mod_base = OTHER; note = 2'-O-methyladenosine-3'-phosphorothioate
  modified_base 22: mod_base = OTHER; note = 2'-O-methyladenosine-3'-phosphorothioate
  modified_base 23: mod_base = OTHER; note = 2'-O-methyladenosine
tgataaagattaaccagaagaaa

SEQ ID NO: 431 - RNA, 23 nt, synthetic construct
  source 1..23: mol_type = other RNA
  modified_base 1: mod_base = OTHER; note = 2'-O-methyluridine-3'-phosphorothioate 5'-(E)-Vinylphosphonate
  modified_base 2: mod_base = OTHER; note = 2'-deoxy-2'-fluorouridine-3'-phosphorothioate
  modified_base 3: mod_base = OTHER; note = 2'-O-methylguanosine-3'-phosphate
  modified_base 4: mod_base = OTHER; note = 2'-O-methyladenosine-3'-phosphate
  modified_base 5: mod_base = OTHER; note = 2'-O-methyluridine-3'-phosphate
  modified_base 6: mod_base = OTHER; note = 2'-deoxy-2'-fluoroadenosine-3'-phosphate
  modified_base 7: mod_base = OTHER; note = 2'-O-methyladenosine-3'-phosphate
  modified_base 8: mod_base = OTHER; note = 2'-deoxy-2'-fluoroadenosine-3'-phosphate
  modified_base 9: mod_base = OTHER; note = 2'-deoxy-2'-fluoroguanosine-3'-phosphate
  modified_base 10: mod_base = OTHER; note = 2'-O-methyladenosine-3'-phosphate
  modified_base 11: mod_base = OTHER; note = 2'-O-methyluridine-3'-phosphate
  modified_base 12: mod_base = OTHER; note = 2'-O-methyluridine-3'-phosphate
  modified_base 13: mod_base = OTHER; note = 2'-O-methyladenosine-3'-phosphate
  modified_base 14: mod_base = OTHER; note = 2'-deoxy-2'-fluoroadenosine-3'-phosphate
  modified_base 15: mod_base = OTHER; note = 2'-O-methylcytidine-3'-phosphate
  modified_base 16: mod_base = OTHER; note = 2'-deoxy-2'-fluorocytidine-3'-phosphate
  modified_base 17: mod_base = OTHER; note = 2'-O-methyladenosine-3'-phosphate
  modified_base 18: mod_base = OTHER; note = 2'-O-methylguanosine-3'-phosphate
  modified_base 19: mod_base = OTHER; note = 2'-O-methyladenosine-3'-phosphate
  modified_base 20: mod_base = OTHER; note = 2'-O-methyladenosine-3'-phosphate
  modified_base 21: mod_base = OTHER; note = 2'-O-methylguanosine-3'-phosphorothioate
  modified_base 22: mod_base = OTHER; note = 2'-O-methyladenosine-3'-phosphorothioate
  modified_base 23: mod_base = OTHER; note = 2'-O-methyladenosine
ttgataaagattaaccagaagaa

SEQ ID NO: 432 - RNA, 23 nt, synthetic construct
  source 1..23: mol_type = other RNA
  modified_base 1: mod_base = OTHER; note = 2'-O-methyluridine-3'-phosphorothioate 5'-(E)-Vinylphosphonate
  modified_base 2: mod_base = OTHER; note = 2'-deoxy-2'-fluorocytidine-3'-phosphorothioate
  modified_base 3: mod_base = OTHER; note = 2'-O-methyluridine-3'-phosphate
  modified_base 4: mod_base = OTHER; note = 2'-O-methylguanosine-3'-phosphate
  modified_base 5: mod_base = OTHER; note = 2'-O-methyladenosine-3'-phosphate
  modified_base 6: mod_base = OTHER; note = 2'-deoxy-2'-fluorouridine-3'-phosphate
  modified_base 7: mod_base = OTHER; note = 2'-O-methyladenosine-3'-phosphate
  modified_base 8: mod_base = OTHER; note = 2'-deoxy-2'-fluoroadenosine-3'-phosphate
  modified_base 9: mod_base = OTHER; note = 2'-deoxy-2'-fluoroadenosine-3'-phosphate
  modified_base 10: mod_base = OTHER; note = 2'-O-methylguanosine-3'-phosphate
  modified_base 11: mod_base = OTHER; note = 2'-O-methyladenosine-3'-phosphate
  modified_base 12: mod_base = OTHER; note = 2'-O-methyluridine-3'-phosphate
  modified_base 13: mod_base = OTHER; note = 2'-O-methyluridine-3'-phosphate
  modified_base 14: mod_base = OTHER; note = 2'-deoxy-2'-fluoroadenosine-3'-phosphate
  modified_base 15: mod_base = OTHER; note = 2'-O-methyladenosine-3'-phosphate
  modified_base 16: mod_base = OTHER; note = 2'-deoxy-2'-fluorocytidine-3'-phosphate
  modified_base 17: mod_base = OTHER; note = 2'-O-methylcytidine-3'-phosphate
  modified_base 18: mod_base = OTHER; note = 2'-O-methyladenosine-3'-phosphate
  modified_base 19: mod_base = OTHER; note = 2'-O-methylguanosine-3'-phosphate
  modified_base 20: mod_base = OTHER; note = 2'-O-methyladenosine-3'-phosphate
  modified_base 21: mod_base = OTHER; note = 2'-O-methyladenosine-3'-phosphorothioate
  modified_base 22: mod_base = OTHER; note = 2'-O-methylguanosine-3'-phosphorothioate
  modified_base 23: mod_base = OTHER; note = 2'-O-methyladenosine
tctgataaagattaaccagaaga

SEQ ID NO: 433 - RNA, 23 nt, synthetic construct
  source 1..23: mol_type = other RNA
  modified_base 1: mod_base = OTHER; note = 2'-O-methyluridine-3'-phosphorothioate 5'-(E)-Vinylphosphonate
  modified_base 2: mod_base = OTHER; note = 2'-deoxy-2'-fluorocytidine-3'-phosphorothioate
  modified_base 3: mod_base = OTHER; note = 2'-O-methylcytidine-3'-phosphate
  modified_base 4: mod_base = OTHER; note = 2'-O-methyluridine-3'-phosphate
  modified_base 5: mod_base = OTHER; note = 2'-O-methylguanosine-3'-phosphate
  modified_base 6: mod_base = OTHER; note = 2'-deoxy-2'-fluoroadenosine-3'-phosphate
  modified_base 7: mod_base = OTHER; note = 2'-O-methyluridine-3'-phosphate
  modified_base 8: mod_base = OTHER; note = 2'-deoxy-2'-fluoroadenosine-3'-phosphate
  modified_base 9: mod_base = OTHER; note = 2'-deoxy-2'-fluoroadenosine-3'-phosphate
  modified_base 10: mod_base = OTHER; note = 2'-O-methyladenosine-3'-phosphate
  modified_base 11: mod_base = OTHER; note = 2'-O-methylguanosine-3'-phosphate
  modified_base 12: mod_base = OTHER; note = 2'-O-methyladenosine-3'-phosphate
  modified_base 13: mod_base = OTHER; note = 2'-O-methyluridine-3'-phosphate
  modified_base 14: mod_base = OTHER; note = 2'-deoxy-2'-fluorouridine-3'-phosphate
  modified_base 15: mod_base = OTHER; note = 2'-O-methyladenosine-3'-phosphate
  modified_base 16: mod_base = OTHER; note = 2'-deoxy-2'-fluoroadenosine-3'-phosphate
  modified_base 17: mod_base = OTHER; note = 2'-O-methylcytidine-3'-phosphate
  modified_base 18: mod_base = OTHER; note = 2'-O-methylcytidine-3'-phosphate
  modified_base 19: mod_base = OTHER; note = 2'-O-methyladenosine-3'-phosphate
  modified_base 20: mod_base = OTHER; note = 2'-O-methylguanosine-3'-phosphate
  modified_base 21: mod_base = OTHER; note = 2'-O-methyladenosine-3'-phosphorothioate
  modified_base 22: mod_base = OTHER; note = 2'-O-methyladenosine-3'-phosphorothioate
  modified_base 23: mod_base = OTHER; note = 2'-O-methylguanosine
tcctgataaagattaaccagaag

SEQ ID NO: 434 - RNA, 23 nt, synthetic construct
  source 1..23: mol_type = other RNA
  modified_base 1: mod_base = OTHER; note = 2'-O-methyluridine-3'-phosphorothioate 5'-(E)-Vinylphosphonate
  modified_base 2: mod_base = OTHER; note = 2'-deoxy-2'-fluoroadenosine-3'-phosphorothioate
  modified_base 3: mod_base = OTHER; note = 2'-O-methylcytidine-3'-phosphate
  modified_base 4: mod_base = OTHER; note = 2'-O-methylcytidine-3'-phosphate
  modified_base 5: mod_base = OTHER; note = 2'-O-methyluridine-3'-phosphate
  modified_base 6: mod_base = OTHER; note = 2'-O-methylguanosine-3'-phosphate
  modified_base 7: mod_base = OTHER; note = Adenosine-glycol nucleic acid (GNA), S-isomer
  modified_base 8: mod_base = OTHER; note = 2'-O-methyluridine-3'-phosphate
  modified_base 9: mod_base = OTHER; note = 2'-O-methyladenosine-3'-phosphate
  modified_base 10: mod_base = OTHER; note = 2'-O-methyladenosine-3'-phosphate
  modified_base 11: mod_base = OTHER; note = 2'-O-methyladenosine-3'-phosphate
  modified_base 12: mod_base = OTHER; note = 2'-O-methylguanosine-3'-phosphate
  modified_base 13: mod_base = OTHER; note = 2'-O-methyladenosine-3'-phosphate
  modified_base 14: mod_base = OTHER; note = 2'-deoxy-2'-fluorouridine-3'-phosphate
  modified_base 15: mod_base = OTHER; note = 2'-O-methyluridine-3'-phosphate
  modified_base 16: mod_base = OTHER; note = 2'-deoxy-2'-fluoroadenosine-3'-phosphate
  modified_base 17: mod_base = OTHER; note = 2'-O-methyladenosine-3'-phosphate
  modified_base 18: mod_base = OTHER; note = 2'-O-methylcytidine-3'-phosphate
  modified_base 19: mod_base = OTHER; note = 2'-O-methylcytidine-3'-phosphate
  modified_base 20: mod_base = OTHER; note = 2'-O-methyladenosine-3'-phosphate
  modified_base 21: mod_base = OTHER; note = 2'-O-methylguanosine-3'-phosphorothioate
  modified_base 22: mod_base = OTHER; note = 2'-O-methyladenosine-3'-phosphorothioate
  modified_base 23: mod_base = OTHER; note = 2'-O-methyladenosine
tacctgataaagattaaccagaa

SEQ ID NO: 435 - RNA, 23 nt, synthetic construct
  source 1..23: mol_type = other RNA
  modified_base 1: mod_base = OTHER; note = 2'-O-methyluridine-3'-phosphorothioate 5'-(E)-Vinylphosphonate
  modified_base 2: mod_base = OTHER; note = 2'-deoxy-2'-fluoroguanosine-3'-phosphorothioate
  modified_base 3: mod_base = OTHER; note = 2'-O-methyladenosine-3'-phosphate
  modified_base 4: mod_base = OTHER; note = 2'-O-methylcytidine-3'-phosphate
  modified_base 5: mod_base = OTHER; note = 2'-O-methylcytidine-3'-phosphate
  modified_base 6: mod_base = OTHER; note = 2'-O-methyluridine-3'-phosphate
  modified_base 7: mod_base = OTHER; note = guanosine-2'-phosphate
  modified_base 8: mod_base = OTHER; note = 2'-O-methyladenosine-3'-phosphate
  modified_base 9: mod_base = OTHER; note = 2'-O-methyluridine-3'-phosphate
  modified_base 10: mod_base = OTHER; note = 2'-O-methyladenosine-3'-phosphate
  modified_base 11: mod_base = OTHER; note = 2'-O-methyladenosine-3'-phosphate
  modified_base 12: mod_base = OTHER; note = 2'-O-methyladenosine-3'-phosphate
  modified_base 13: mod_base = OTHER; note = 2'-O-methylguanosine-3'-phosphate
  modified_base 14: mod_base = OTHER; note = 2'-deoxy-2'-fluoroadenosine-3'-phosphate
  modified_base 15: mod_base = OTHER; note = 2'-O-methyluridine-3'-phosphate
  modified_base 16: mod_base = OTHER; note = 2'-deoxy-2'-fluorouridine-3'-phosphate
  modified_base 17: mod_base = OTHER; note = 2'-O-methyladenosine-3'-phosphate
  modified_base 18: mod_base = OTHER; note = 2'-O-methyladenosine-3'-phosphate
  modified_base 19: mod_base = OTHER; note = 2'-O-methylcytidine-3'-phosphate
  modified_base 20: mod_base = OTHER; note = 2'-O-methylcytidine-3'-phosphate
  modified_base 21: mod_base = OTHER; note = 2'-O-methyladenosine-3'-phosphorothioate
  modified_base 22: mod_base = OTHER; note = 2'-O-methylguanosine-3'-phosphorothioate
  modified_base 23: mod_base = OTHER; note = 2'-O-methyladenosine
tgacctgataaagattaaccaga

SEQ ID NO: 436 - RNA, 23 nt, synthetic construct
  source 1..23: mol_type = other RNA
  modified_base 1: mod_base = OTHER; note = 2'-O-methyluridine-3'-phosphorothioate 5'-(E)-Vinylphosphonate
  modified_base 2: mod_base = OTHER; note = 2'-deoxy-2'-fluoroadenosine-3'-phosphorothioate
  modified_base 3: mod_base = OTHER; note = 2'-O-methyladenosine-3'-phosphate
  modified_base 4: mod_base = OTHER; note = 2'-O-methylguanosine-3'-phosphate
  modified_base 5: mod_base = OTHER; note = 2'-O-methyladenosine-3'-phosphate
  modified_base 6: mod_base = OTHER; note = 2'-O-methylcytidine-3'-phosphate
  modified_base 7: mod_base = OTHER; note = cytidine-2'-phosphate
  modified_base 8: mod_base = OTHER; note = 2'-O-methyluridine-3'-phosphate
  modified_base 9: mod_base = OTHER; note = 2'-O-methylguanosine-3'-phosphate
  modified_base 10: mod_base = OTHER; note = 2'-O-methyladenosine-3'-phosphate
  modified_base 11: mod_base = OTHER; note = 2'-O-methyluridine-3'-phosphate
  modified_base 12: mod_base = OTHER; note = 2'-O-methyladenosine-3'-phosphate
  modified_base 13: mod_base = OTHER; note = 2'-O-methyladenosine-3'-phosphate
  modified_base 14: mod_base = OTHER; note = 2'-deoxy-2'-fluoroadenosine-3'-phosphate
  modified_base 15: mod_base = OTHER; note = 2'-O-methylguanosine-3'-phosphate
  modified_base 16: mod_base = OTHER; note = 2'-deoxy-2'-fluoroadenosine-3'-phosphate
  modified_base 17: mod_base = OTHER; note = 2'-O-methyluridine-3'-phosphate
  modified_base 18: mod_base = OTHER; note = 2'-O-methyluridine-3'-phosphate
  modified_base 19: mod_base = OTHER; note = 2'-O-methyladenosine-3'-phosphate
  modified_base 20: mod_base = OTHER; note = 2'-O-methyladenosine-3'-phosphate
  modified_base 21: mod_base = OTHER; note = 2'-O-methylcytidine-3'-phosphorothioate
  modified_base 22: mod_base = OTHER; note = 2'-O-methylcytidine-3'-phosphorothioate
  modified_base 23: mod_base = OTHER; note = 2'-O-methyladenosine
taagacctgataaagattaacca

SEQ ID NO: 437 - RNA, 23 nt, synthetic construct
  source 1..23: mol_type = other RNA
  modified_base 1: mod_base = OTHER; note = 2'-O-methyluridine-3'-phosphorothioate 5'-(E)-Vinylphosphonate
  modified_base 2: mod_base = OTHER; note = 2'-deoxy-2'-fluoroadenosine-3'-phosphorothioate
  modified_base 3: mod_base = OTHER; note = 2'-O-methyladenosine-3'-phosphate
  modified_base 4: mod_base = OTHER; note = 2'-O-methyladenosine-3'-phosphate
  modified_base 5: mod_base = OTHER; note = 2'-O-methylguanosine-3'-phosphate
  modified_base 6: mod_base = OTHER; note = 2'-O-methyladenosine-3'-phosphate
  modified_base 7: mod_base = OTHER; note = cytidine-2'-phosphate
  modified_base 8: mod_base = OTHER; note = 2'-O-methylcytidine-3'-phosphate
  modified_base 9: mod_base = OTHER; note = 2'-O-methyluridine-3'-phosphate
  modified_base 10: mod_base = OTHER; note = 2'-O-methylguanosine-3'-phosphate
  modified_base 11: mod_base = OTHER; note = 2'-O-methyladenosine-3'-phosphate
  modified_base 12: mod_base = OTHER; note = 2'-O-methyluridine-3'-phosphate
  modified_base 13: mod_base = OTHER; note = 2'-O-methyladenosine-3'-phosphate
  modified_base 14: mod_base = OTHER; note = 2'-deoxy-2'-fluoroadenosine-3'-phosphate
  modified_base 15: mod_base = OTHER; note = 2'-O-methyladenosine-3'-phosphate
  modified_base 16: mod_base = OTHER; note = 2'-deoxy-2'-fluoroguanosine-3'-phosphate
  modified_base 17: mod_base = OTHER; note = 2'-O-methyladenosine-3'-phosphate
  modified_base 18: mod_base = OTHER; note = 2'-O-methyluridine-3'-phosphate
  modified_base 19: mod_base = OTHER; note = 2'-O-methyluridine-3'-phosphate
  modified_base 20: mod_base = OTHER; note = 2'-O-methyladenosine-3'-phosphate
  modified_base 21: mod_base = OTHER; note = 2'-O-methyladenosine-3'-phosphorothioate
  modified_base 22: mod_base = OTHER; note = 2'-O-methylcytidine-3'-phosphorothioate
  modified_base 23: mod_base = OTHER; note = 2'-O-methylcytidine
taaagacctgataaagattaacc

SEQ ID NO: 438 - RNA, 23 nt, synthetic construct
  source 1..23: mol_type = other RNA
  modified_base 1: mod_base = OTHER; note = 2'-O-methyluridine-3'-phosphorothioate 5'-(E)-Vinylphosphonate
  modified_base 2: mod_base = OTHER; note = 2'-deoxy-2'-fluoroguanosine-3'-phosphorothioate
  modified_base 3: mod_base = OTHER; note = 2'-O-methyladenosine-3'-phosphate
  modified_base 4: mod_base = OTHER; note = 2'-O-methyladenosine-3'-phosphate
  modified_base 5: mod_base = OTHER; note = 2'-O-methyladenosine-3'-phosphate
  modified_base 6: mod_base = OTHER; note = 2'-deoxy-2'-fluoroadenosine-3'-phosphate
  modified_base 7: mod_base = OTHER; note = 2'-O-methylguanosine-3'-phosphate
  modified_base 8: mod_base = OTHER; note = 2'-deoxy-2'-fluoroadenosine-3'-phosphate
  modified_base 9: mod_base = OTHER; note = 2'-deoxy-2'-fluorocytidine-3'-phosphate
  modified_base 10: mod_base = OTHER; note = 2'-O-methylcytidine-3'-phosphate
  modified_base 11: mod_base = OTHER; note = 2'-O-methyluridine-3'-phosphate
  modified_base 12: mod_base = OTHER; note = 2'-O-methylguanosine-3'-phosphate
  modified_base 13: mod_base = OTHER; note = 2'-O-methyladenosine-3'-phosphate
  modified_base 14: mod_base = OTHER; note = 2'-deoxy-2'-fluorouridine-3'-phosphate
  modified_base 15: mod_base = OTHER; note = 2'-O-methyladenosine-3'-phosphate
  modified_base 16: mod_base = OTHER; note = 2'-deoxy-2'-fluoroadenosine-3'-phosphate
  modified_base 17: mod_base = OTHER; note = 2'-O-methyladenosine-3'-phosphate
  modified_base 18: mod_base = OTHER; note = 2'-O-methylguanosine-3'-phosphate
  modified_base 19: mod_base = OTHER; note = 2'-O-methyladenosine-3'-phosphate
  modified_base 20: mod_base = OTHER; note = 2'-O-methyluridine-3'-phosphate
  modified_base 21: mod_base = OTHER; note = 2'-O-methyluridine-3'-phosphorothioate
  modified_base 22: mod_base = OTHER; note = 2'-O-methyladenosine-3'-phosphorothioate
  modified_base 23: mod_base = OTHER; note = 2'-O-methyladenosine
tgaaaagacctgataaagattaa

SEQ ID NO: 439 - RNA, 23 nt, synthetic construct
  source 1..23: mol_type = other RNA
  modified_base 1: mod_base = OTHER; note = 2'-O-methyluridine-3'-phosphorothioate 5'-(E)-Vinylphosphonate
  modified_base 2: mod_base = OTHER; note = 2'-deoxy-2'-fluoroadenosine-3'-phosphorothioate
  modified_base 3: mod_base = OTHER; note = 2'-O-methylguanosine-3'-phosphate
  modified_base 4: mod_base = OTHER; note = 2'-O-methyladenosine-3'-phosphate
  modified_base 5: mod_base = OTHER; note = 2'-O-methyladenosine-3'-phosphate
  modified_base 6: mod_base = OTHER; note = 2'-deoxy-2'-fluoroadenosine-3'-phosphate
  modified_base 7: mod_base = OTHER; note = 2'-O-methyladenosine-3'-phosphate
  modified_base 8: mod_base = OTHER; note = 2'-deoxy-2'-fluoroguanosine-3'-phosphate
  modified_base 9: mod_base = OTHER; note = 2'-deoxy-2'-fluoroadenosine-3'-phosphate
  modified_base 10: mod_base = OTHER; note = 2'-O-methylcytidine-3'-phosphate
  modified_base 11: mod_base = OTHER; note = 2'-O-methylcytidine-3'-phosphate
  modified_base 12: mod_base = OTHER; note = 2'-O-methyluridine-3'-phosphate
  modified_base 13: mod_base = OTHER; note = 2'-O-methylguanosine-3'-phosphate
  modified_base 14: mod_base = OTHER; note = 2'-deoxy-2'-fluoroadenosine-3'-phosphate
  modified_base 15: mod_base = OTHER; note = 2'-O-methyluridine-3'-phosphate
  modified_base 16: mod_base = OTHER; note = 2'-deoxy-2'-fluoroadenosine-3'-phosphate
  modified_base 17: mod_base = OTHER; note = 2'-O-methyladenosine-3'-phosphate
  modified_base 18: mod_base = OTHER; note = 2'-O-methyladenosine-3'-phosphate
  modified_base 19: mod_base = OTHER; note = 2'-O-methylguanosine-3'-phosphate
  modified_base 20: mod_base = OTHER; note = 2'-O-methyladenosine-3'-phosphate
  modified_base 21: mod_base = OTHER; note = 2'-O-methyluridine-3'-phosphorothioate
  modified_base 22: mod_base = OTHER; note = 2'-O-methyluridine-3'-phosphorothioate
  modified_base 23: mod_base = OTHER; note = 2'-O-methyladenosine
tagaaaagacctgataaagatta

SEQ ID NO: 440 - RNA, 23 nt, synthetic construct
  source 1..23: mol_type = other RNA
  modified_base 1: mod_base = OTHER; note = 2'-O-methyluridine-3'-phosphorothioate 5'-(E)-Vinylphosphonate
  modified_base 2: mod_base = OTHER; note = 2'-deoxy-2'-fluoroadenosine-3'-phosphorothioate
  modified_base 3: mod_base = OTHER; note = 2'-O-methyladenosine-3'-phosphate
  modified_base 4: mod_base = OTHER; note = 2'-O-methylguanosine-3'-phosphate
  modified_base 5: mod_base = OTHER; note = 2'-O-methyladenosine-3'-phosphate
  modified_base 6: mod_base = OTHER; note = 2'-deoxy-2'-fluoroadenosine-3'-phosphate
  modified_base 7: mod_base = OTHER; note = 2'-O-methyladenosine-3'-phosphate
  modified_base 8: mod_base = OTHER; note = 2'-deoxy-2'-fluoroadenosine-3'-phosphate
  modified_base 9: mod_base = OTHER; note = 2'-deoxy-2'-fluoroguanosine-3'-phosphate
  modified_base 10: mod_base = OTHER; note = 2'-O-methyladenosine-3'-phosphate
  modified_base 11: mod_base = OTHER; note = 2'-O-methylcytidine-3'-phosphate
  modified_base 12: mod_base = OTHER; note = 2'-O-methylcytidine-3'-phosphate
  modified_base 13: mod_base = OTHER; note = 2'-O-methyluridine-3'-phosphate
  modified_base 14: mod_base = OTHER; note = 2'-deoxy-2'-fluoroguanosine-3'-phosphate
  modified_base 15: mod_base = OTHER; note = 2'-O-methyladenosine-3'-phosphate
  modified_base 16: mod_base = OTHER; note = 2'-deoxy-2'-fluorouridine-3'-phosphate
  modified_base 17: mod_base = OTHER; note = 2'-O-methyladenosine-3'-phosphate
  modified_base 18: mod_base = OTHER; note = 2'-O-methyladenosine-3'-phosphate
  modified_base 19: mod_base = OTHER; note = 2'-O-methyladenosine-3'-phosphate
  modified_base 20: mod_base = OTHER; note = 2'-O-methylguanosine-3'-phosphate
  modified_base 21: mod_base = OTHER; note = 2'-O-methyladenosine-3'-phosphorothioate
  modified_base 22: mod_base = OTHER; note = 2'-O-methyluridine-3'-phosphorothioate
  modified_base 23: mod_base = OTHER; note = 2'-O-methyluridine
taagaaaagacctgataaagatt

SEQ ID NO: 441 - RNA, 23 nt, synthetic construct
  source 1..23: mol_type = other RNA
  modified_base 1: mod_base = OTHER; note = 2'-O-methyluridine-3'-phosphorothioate 5'-(E)-Vinylphosphonate
  modified_base 2: mod_base = OTHER; note = 2'-deoxy-2'-fluorocytidine-3'-phosphorothioate
  modified_base 3: mod_base = OTHER; note = 2'-O-methyladenosine-3'-phosphate
  modified_base 4: mod_base = OTHER; note = 2'-O-methyladenosine-3'-phosphate
  modified_base 5: mod_base = OTHER; note = 2'-O-methylguanosine-3'-phosphate
  modified_base 6: mod_base = OTHER; note = 2'-deoxy-2'-fluoroadenosine-3'-phosphate
  modified_base 7: mod_base = OTHER; note = 2'-O-methyladenosine-3'-phosphate
  modified_base 8: mod_base = OTHER; note = 2'-deoxy-2'-fluoroadenosine-3'-phosphate
  modified_base 9: mod_base = OTHER; note = 2'-deoxy-2'-fluoroadenosine-3'-phosphate
  modified_base 10: mod_base = OTHER; note = 2'-O-methylguanosine-3'-phosphate
  modified_base 11: mod_base = OTHER; note = 2'-O-methyladenosine-3'-phosphate
  modified_base 12: mod_base = OTHER; note = 2'-O-methylcytidine-3'-phosphate
  modified_base 13: mod_base = OTHER; note = 2'-O-methylcytidine-3'-phosphate
  modified_base 14: mod_base = OTHER; note = 2'-deoxy-2'-fluorouridine-3'-phosphate
  modified_base 15: mod_base = OTHER; note = 2'-O-methylguanosine-3'-phosphate
  modified_base 16: mod_base = OTHER; note = 2'-deoxy-2'-fluoroadenosine-3'-phosphate
  modified_base 17: mod_base = OTHER; note = 2'-O-methyluridine-3'-phosphate
  modified_base 18: mod_base = OTHER; note = 2'-O-methyladenosine-3'-phosphate
  modified_base 19: mod_base = OTHER; note = 2'-O-methyladenosine-3'-phosphate
  modified_base 20: mod_base = OTHER; note = 2'-O-methyladenosine-3'-phosphate
  modified_base 21: mod_base = OTHER; note = 2'-O-methylguanosine-3'-phosphorothioate
  modified_base 22: mod_base = OTHER; note = 2'-O-methyladenosine-3'-phosphorothioate
  modified_base 23: mod_base = OTHER; note = 2'-O-methyluridine
tcaagaaaagacctgataaagat

SEQ ID NO: 442 - RNA, 23 nt, synthetic construct
  source 1..23: mol_type = other RNA
  modified_base 1: mod_base = OTHER; note = 2'-O-methyluridine-3'-phosphorothioate 5'-(E)-Vinylphosphonate
  modified_base 2: mod_base = OTHER; note = 2'-deoxy-2'-fluoroadenosine-3'-phosphorothioate
  modified_base 3: mod_base = OTHER; note = 2'-O-methylcytidine-3'-phosphate
  modified_base 4: mod_base = OTHER; note = 2'-O-methyladenosine-3'-phosphate
  modified_base 5: mod_base = OTHER; note = 2'-O-methyladenosine-3'-phosphate
  modified_base 6: mod_base = OTHER; note = 2'-deoxy-2'-fluoroguanosine-3'-phosphate
  modified_base 7: mod_base = OTHER; note = 2'-O-methyladenosine-3'-phosphate
  modified_base 8: mod_base = OTHER; note = 2'-deoxy-2'-fluoroadenosine-3'-phosphate
  modified_base 9: mod_base = OTHER; note = 2'-deoxy-2'-fluoroadenosine-3'-phosphate
  modified_base 10: mod_base = OTHER; note = 2'-O-methyladenosine-3'-phosphate
  modified_base 11: mod_base = OTHER; note = 2'-O-methylguanosine-3'-phosphate
  modified_base 12: mod_base = OTHER; note = 2'-O-methyladenosine-3'-phosphate
  modified_base 13: mod_base = OTHER; note = 2'-O-methylcytidine-3'-phosphate
  modified_base 14: mod_base = OTHER; note = 2'-deoxy-2'-fluorocytidine-3'-phosphate
  modified_base 15: mod_base = OTHER; note = 2'-O-methyluridine-3'-phosphate
  modified_base 16: mod_base = OTHER; note = 2'-deoxy-2'-fluoroguanosine-3'-phosphate
  modified_base 17: mod_base = OTHER; note = 2'-O-methyladenosine-3'-phosphate
  modified_base 18: mod_base = OTHER; note = 2'-O-methyluridine-3'-phosphate
  modified_base 19: mod_base = OTHER; note = 2'-O-methyladenosine-3'-phosphate
  modified_base 20: mod_base = OTHER; note = 2'-O-methyladenosine-3'-phosphate
  modified_base 21: mod_base = OTHER; note = 2'-O-methyladenosine-3'-phosphorothioate
  modified_base 22: mod_base = OTHER; note = 2'-O-methylguanosine-3'-phosphorothioate
  modified_base 23: mod_base = OTHER; note = 2'-O-methyladenosine
tacaagaaaagacctgataaaga

SEQ ID NO: 443 - RNA, 23 nt, synthetic construct
  source 1..23: mol_type = other RNA
  modified_base 1: mod_base = OTHER; note = 2'-O-methyluridine-3'-phosphorothioate 5'-(E)-Vinylphosphonate
  modified_base 2: mod_base = OTHER; note = 2'-deoxy-2'-fluoroadenosine-3'-phosphorothioate
  modified_base 3: mod_base = OTHER; note = 2'-O-methyladenosine-3'-phosphate
  modified_base 4: mod_base = OTHER; note = 2'-O-methylcytidine-3'-phosphate
  modified_base 5: mod_base = OTHER; note = 2'-O-methyladenosine-3'-phosphate
  modified_base 6: mod_base = OTHER; note = 2'-deoxy-2'-fluoroadenosine-3'-phosphate
  modified_base 7: mod_base = OTHER; note = 2'-O-methylguanosine-3'-phosphate
  modified_base 8: mod_base = OTHER; note = 2'-deoxy-2'-fluoroadenosine-3'-phosphate
  modified_base 9: mod_base = OTHER; note = 2'-deoxy-2'-fluoroadenosine-3'-phosphate
  modified_base 10: mod_base = OTHER; note = 2'-O-methyladenosine-3'-phosphate
  modified_base 11: mod_base = OTHER; note = 2'-O-methyladenosine-3'-phosphate
  modified_base 12: mod_base = OTHER; note = 2'-O-methylguanosine-3'-phosphate
  modified_base 13: mod_base = OTHER; note = 2'-O-methyladenosine-3'-phosphate
  modified_base 14: mod_base = OTHER; note = 2'-deoxy-2'-fluorocytidine-3'-phosphate
  modified_base 15: mod_base = OTHER; note = 2'-O-methylcytidine-3'-phosphate
  modified_base 16: mod_base = OTHER; note = 2'-deoxy-2'-fluorouridine-3'-phosphate
  modified_base 17: mod_base = OTHER; note = 2'-O-methylguanosine-3'-phosphate
  modified_base 18: mod_base = OTHER; note = 2'-O-methyladenosine-3'-phosphate
  modified_base 19: mod_base = OTHER; note = 2'-O-methyluridine-3'-phosphate
  modified_base 20: mod_base = OTHER; note = 2'-O-methyladenosine-3'-phosphate
  modified_base 21: mod_base = OTHER; note = 2'-O-methyladenosine-3'-phosphorothioate
  modified_base 22: mod_base = OTHER; note = 2'-O-methyladenosine-3'-phosphorothioate
  modified_base 23: mod_base = OTHER; note = 2'-O-methylguanosine
taacaagaaaagacctgataaag

SEQ ID NO: 444 - RNA, 23 nt, synthetic construct
  source 1..23: mol_type = other RNA
  modified_base 1: mod_base = OTHER; note = 2'-O-methyluridine-3'-phosphorothioate 5'-(E)-Vinylphosphonate
  modified_base 2: mod_base = OTHER; note = 2'-deoxy-2'-fluoroguanosine-3'-phosphorothioate
  modified_base 3: mod_base = OTHER; note = 2'-O-methyladenosine-3'-phosphate
  modified_base 4: mod_base = OTHER; note = 2'-O-methyladenosine-3'-phosphate
  modified_base 5: mod_base = OTHER; note = 2'-O-methylcytidine-3'-phosphate
  modified_base 6: mod_base = OTHER; note = 2'-deoxy-2'-fluoroadenosine-3'-phosphate
  modified_base 7: mod_base = OTHER; note = 2'-O-methyladenosine-3'-phosphate
  modified_base 8: mod_base = OTHER; note = 2'-deoxy-2'-fluoroguanosine-3'-phosphate
  modified_base 9: mod_base = OTHER; note = 2'-deoxy-2'-fluoroadenosine-3'-phosphate
  modified_base 10: mod_base = OTHER; note = 2'-O-methyladenosine-3'-phosphate
  modified_base 11: mod_base = OTHER; note = 2'-O-methyladenosine-3'-phosphate
  modified_base 12: mod_base = OTHER; note = 2'-O-methyladenosine-3'-phosphate
  modified_base 13: mod_base = OTHER; note = 2'-O-methylguanosine-3'-phosphate
  modified_base 14: mod_base = OTHER; note = 2'-deoxy-2'-fluoroadenosine-3'-phosphate
  modified_base 15: mod_base = OTHER; note = 2'-O-methylcytidine-3'-phosphate
  modified_base 16: mod_base = OTHER; note = 2'-deoxy-2'-fluorocytidine-3'-phosphate
  modified_base 17: mod_base = OTHER; note = 2'-O-methyluridine-3'-phosphate
  modified_base 18: mod_base = OTHER; note = 2'-O-methylguanosine-3'-phosphate
  modified_base 19: mod_base = OTHER; note = 2'-O-methyladenosine-3'-phosphate
  modified_base 20: mod_base = OTHER; note = 2'-O-methyluridine-3'-phosphate
  modified_base 21: mod_base = OTHER; note = 2'-O-methyladenosine-3'-phosphorothioate
  modified_base 22: mod_base = OTHER; note = 2'-O-methyladenosine-3'-phosphorothioate
  modified_base 23: mod_base = OTHER; note = 2'-O-methyladenosine
tgaacaagaaaagacctgataaa

SEQ ID NO: 445 - RNA, 23 nt, synthetic construct
  source 1..23: mol_type = other RNA
  modified_base 1: mod_base = OTHER; note = 2'-O-methyluridine-3'-phosphorothioate 5'-(E)-Vinylphosphonate
  modified_base 2: mod_base = OTHER; note = 2'-deoxy-2'-fluorouridine-3'-phosphorothioate
  modified_base 3: mod_base = OTHER; note = 2'-O-methylguanosine-3'-phosphate
  modified_base 4: mod_base = OTHER; note = 2'-O-methyladenosine-3'-phosphate
  modified_base 5: mod_base = OTHER; note = 2'-O-methyladenosine-3'-phosphate
  modified_base 6: mod_base = OTHER; note = 2'-deoxy-2'-fluorocytidine-3'-phosphate
  modified_base 7: mod_base = OTHER; note = 2'-O-methyladenosine-3'-phosphate
  modified_base 8: mod_base = OTHER; note = 2'-deoxy-2'-fluoroadenosine-3'-phosphate
  modified_base 9: mod_base = OTHER; note = 2'-deoxy-2'-fluoroguanosine-3'-phosphate
  modified_base 10: mod_base = OTHER; note = 2'-O-methyladenosine-3'-phosphate
  modified_base 11: mod_base = OTHER; note = 2'-O-methyladenosine-3'-phosphate
  modified_base 12: mod_base = OTHER; note = 2'-O-methyladenosine-3'-phosphate
  modified_base 13: mod_base = OTHER; note = 2'-O-methyladenosine-3'-phosphate
  modified_base 14: mod_base = OTHER; note = 2'-deoxy-2'-fluoroguanosine-3'-phosphate
  modified_base 15: mod_base = OTHER; note = 2'-O-methyladenosine-3'-phosphate
  modified_base 16: mod_base = OTHER; note = 2'-deoxy-2'-fluorocytidine-3'-phosphate
  modified_base 17: mod_base = OTHER; note = 2'-O-methylcytidine-3'-phosphate
  modified_base 18: mod_base = OTHER; note = 2'-O-methyluridine-3'-phosphate
  modified_base 19: mod_base = OTHER; note = 2'-O-methylguanosine-3'-phosphate
  modified_base 20: mod_base = OTHER; note = 2'-O-methyladenosine-3'-phosphate
  modified_base 21: mod_base = OTHER; note = 2'-O-methyluridine-3'-phosphorothioate
  modified_base 22: mod_base = OTHER; note = 2'-O-methyladenosine-3'-phosphorothioate
  modified_base 23: mod_base = OTHER; note = 2'-O-methyladenosine
ttgaacaagaaaagacctgataa

SEQ ID NO: 446 - RNA, 23 nt, synthetic construct
  source 1..23: mol_type = other RNA
  modified_base 1: mod_base = OTHER; note = 2'-O-methyluridine-3'-phosphorothioate 5'-(E)-Vinylphosphonate
  modified_base 2: mod_base = OTHER; note = 2'-deoxy-2'-fluoroguanosine-3'-phosphorothioate
  modified_base 3: mod_base = OTHER; note = 2'-O-methyluridine-3'-phosphate
  modified_base 4: mod_base = OTHER; note = 2'-O-methylguanosine-3'-phosphate
  modified_base 5: mod_base = OTHER; note = 2'-O-methyladenosine-3'-phosphate
  modified_base 6: mod_base = OTHER; note = 2'-O-methyladenosine-3'-phosphate
  modified_base 7: mod_base = OTHER; note = cytidine-2'-phosphate
  modified_base 8: mod_base = OTHER; note = 2'-O-methyladenosine-3'-phosphate
  modified_base 9: mod_base = OTHER; note = 2'-O-methyladenosine-3'-phosphate
  modified_base 10: mod_base = OTHER; note = 2'-O-methylguanosine-3'-phosphate
  modified_base 11: mod_base = OTHER; note = 2'-O-methyladenosine-3'-phosphate
  modified_base 12: mod_base = OTHER; note = 2'-O-methyladenosine-3'-phosphate
  modified_base 13: mod_base = OTHER; note = 2'-O-methyladenosine-3'-phosphate
  modified_base 14: mod_base = OTHER; note = 2'-deoxy-2'-fluoroadenosine-3'-phosphate
  modified_base 15: mod_base = OTHER; note = 2'-O-methylguanosine-3'-phosphate
  modified_base 16: mod_base = OTHER; note = 2'-deoxy-2'-fluoroadenosine-3'-phosphate
  modified_base 17: mod_base = OTHER; note = 2'-O-methylcytidine-3'-phosphate
  modified_base 18: mod_base = OTHER; note = 2'-O-methylcytidine-3'-phosphate
  modified_base 19: mod_base = OTHER; note = 2'-O-methyluridine-3'-phosphate
  modified_base 20: mod_base = OTHER; note = 2'-O-methylguanosine-3'-phosphate
  modified_base 21: mod_base = OTHER; note = 2'-O-methyladenosine-3'-phosphorothioate
  modified_base 22: mod_base = OTHER; note = 2'-O-methyluridine-3'-phosphorothioate
  modified_base 23: mod_base = OTHER; note = 2'-O-methyladenosine
tgtgaacaagaaaagacctgata

SEQ ID NO: 447 - RNA, 23 nt, synthetic construct
  source 1..23: mol_type = other RNA
  modified_base 1: mod_base = OTHER; note = 2'-O-methyluridine-3'-phosphorothioate 5'-(E)-Vinylphosphonate
  modified_base 2: mod_base = OTHER; note = 2'-deoxy-2'-fluoroguanosine-3'-phosphorothioate
  modified_base 3: mod_base = OTHER; note = 2'-O-methylguanosine-3'-phosphate
  modified_base 4: mod_base = OTHER; note = 2'-O-methyluridine-3'-phosphate
  modified_base 5: mod_base = OTHER; note = 2'-O-methylguanosine-3'-phosphate
  modified_base 6: mod_base = OTHER; note = 2'-O-methyladenosine-3'-phosphate
  modified_base 7: mod_base = OTHER; note = Adenosine-glycol nucleic acid (GNA), S-isomer
  modified_base 8: mod_base = OTHER; note = 2'-O-methylcytidine-3'-phosphate
  modified_base 9: mod_base = OTHER; note = 2'-O-methyladenosine-3'-phosphate
  modified_base 10: mod_base = OTHER; note = 2'-O-methyladenosine-3'-phosphate
  modified_base 11: mod_base = OTHER; note = 2'-O-methylguanosine-3'-phosphate
  modified_base 12: mod_base = OTHER; note = 2'-O-methyladenosine-3'-phosphate
  modified_base 13: mod_base = OTHER; note = 2'-O-methyladenosine-3'-phosphate
  modified_base 14: mod_base = OTHER; note = 2'-deoxy-2'-fluoroadenosine-3'-phosphate
  modified_base 15: mod_base = OTHER; note = 2'-O-methyladenosine-3'-phosphate
  modified_base 16: mod_base = OTHER; note = 2'-deoxy-2'-fluoroguanosine-3'-phosphate
  modified_base 17: mod_base = OTHER; note = 2'-O-methyladenosine-3'-phosphate
  modified_base 18: mod_base = OTHER; note = 2'-O-methylcytidine-3'-phosphate
  modified_base 19: mod_base = OTHER; note = 2'-O-methylcytidine-3'-phosphate
  modified_base 20: mod_base = OTHER; note = 2'-O-methyluridine-3'-phosphate
  modified_base 21: mod_base = OTHER; note = 2'-O-methylguanosine-3'-phosphorothioate
  modified_base 22: mod_base = OTHER; note = 2'-O-methyladenosine-3'-phosphorothioate
  modified_base 23: mod_base = OTHER; note = 2'-O-methyluridine
tggtgaacaagaaaagacctgat

SEQ ID NO: 448 - RNA, 23 nt, synthetic construct
  source 1..23: mol_type = other RNA
  modified_base 1: mod_base = OTHER; note = 2'-O-methyluridine-3'-phosphorothioate 5'-(E)-Vinylphosphonate
  modified_base 2: mod_base = OTHER; note = 2'-deoxy-2'-fluoroadenosine-3'-phosphorothioate
  modified_base 3: mod_base = OTHER; note = 2'-O-methylguanosine-3'-phosphate
  modified_base 4: mod_base = OTHER; note = 2'-O-methylguanosine-3'-phosphate
  modified_base 5: mod_base = OTHER; note = 2'-O-methylguanosine-3'-phosphate
  modified_base 6: mod_base = OTHER; note = 2'-O-methyluridine-3'-phosphate
  modified_base 7: mod_base = OTHER; note = guanosine-2'-phosphate
  modified_base 8: mod_base = OTHER; note = 2'-O-methyladenosine-3'-phosphate
  modified_base 9: mod_base = OTHER; note = 2'-O-methyladenosine-3'-phosphate
  modified_base 10: mod_base = OTHER; note = 2'-O-methylcytidine-3'-phosphate
  modified_base 11: mod_base = OTHER; note = 2'-O-methyladenosine-3'-phosphate
  modified_base 12: mod_base = OTHER; note = 2'-O-methyladenosine-3'-phosphate
  modified_base 13: mod_base = OTHER; note = 2'-O-methylguanosine-3'-phosphate
  modified_base 14: mod_base = OTHER; note = 2'-deoxy-2'-fluoroadenosine-3'-phosphate
  modified_base 15: mod_base = OTHER; note = 2'-O-methyladenosine-3'-phosphate
  modified_base 16: mod_base = OTHER; note = 2'-deoxy-2'-fluoroadenosine-3'-phosphate
  modified_base 17: mod_base = OTHER; note = 2'-O-methyladenosine-3'-phosphate
  modified_base 18: mod_base = OTHER; note = 2'-O-methylguanosine-3'-phosphate
  modified_base 19: mod_base = OTHER; note = 2'-O-methyladenosine-3'-phosphate
  modified_base 20: mod_base = OTHER; note = 2'-O-methylcytidine-3'-phosphate
  modified_base 21: mod_base = OTHER; note = 2'-O-methylcytidine-3'-phosphorothioate
  modified_base 22: mod_base = OTHER; note = 2'-O-methyluridine-3'-phosphorothioate
  modified_base 23: mod_base = OTHER; note = 2'-O-methylguanosine
tagggtgaacaagaaaagacctg

SEQ ID NO: 449 - RNA, 23 nt, synthetic construct
  source 1..23: mol_type = other RNA
  modified_base 1: mod_base = OTHER; note = 2'-O-methyluridine-3'-phosphorothioate 5'-(E)-Vinylphosphonate
  modified_base 2: mod_base = OTHER; note = 2'-deoxy-2'-fluorouridine-3'-phosphorothioate
  modified_base 3: mod_base = OTHER; note = 2'-O-methylguanosine-3'-phosphate
  modified_base 4: mod_base = OTHER; note = 2'-O-methyladenosine-3'-phosphate
  modified_base 5: mod_base = OTHER; note = 2'-O-methylguanosine-3'-phosphate
  modified_base 6: mod_base = OTHER; note = 2'-O-methylguanosine-3'-phosphate
  modified_base 7: mod_base = OTHER; note = guanosine-2'-phosphate
  modified_base 8: mod_base = OTHER; note = 2'-O-methyluridine-3'-phosphate
  modified_base 9: mod_base = OTHER; note = 2'-O-methylguanosine-3'-phosphate
  modified_base 10: mod_base = OTHER; note = 2'-O-methyladenosine-3'-phosphate
  modified_base 11: mod_base = OTHER; note = 2'-O-methyladenosine-3'-phosphate
  modified_base 12: mod_base = OTHER; note = 2'-O-methylcytidine-3'-phosphate
  modified_base 13: mod_base = OTHER; note = 2'-O-methyladenosine-3'-phosphate
  modified_base 14: mod_base = OTHER; note = 2'-deoxy-2'-fluoroadenosine-3'-phosphate
  modified_base 15: mod_base = OTHER; note = 2'-O-methylguanosine-3'-phosphate
  modified_base 16: mod_base = OTHER; note = 2'-deoxy-2'-fluoroadenosine-3'-phosphate
  modified_base 17: mod_base = OTHER; note = 2'-O-methyladenosine-3'-phosphate
  modified_base 18: mod_base = OTHER; note = 2'-O-methyladenosine-3'-phosphate
  modified_base 19: mod_base = OTHER; note = 2'-O-methyladenosine-3'-phosphate
  modified_base 20: mod_base = OTHER; note = 2'-O-methylguanosine-3'-phosphate
  modified_base 21: mod_base = OTHER; note = 2'-O-methyladenosine-3'-phosphorothioate
  modified_base 22: mod_base = OTHER; note = 2'-O-methylcytidine-3'-phosphorothioate
  modified_base 23: mod_base = OTHER; note = 2'-O-methylcytidine
ttgagggtgaacaagaaaagacc

SEQ ID NO: 450 - RNA, 23 nt, synthetic construct
  source 1..23: mol_type = other RNA
  modified_base 1: mod_base = OTHER; note = 2'-O-methyluridine-3'-phosphorothioate 5'-(E)-Vinylphosphonate
  modified_base 2: mod_base = OTHER; note = 2'-deoxy-2'-fluorocytidine-3'-phosphorothioate
  modified_base 3: mod_base = OTHER; note = 2'-O-methyluridine-3'-phosphate
  modified_base 4: mod_base = OTHER; note = 2'-O-methylguanosine-3'-phosphate
  modified_base 5: mod_base = OTHER; note = 2'-O-methyladenosine-3'-phosphate
  modified_base 6: mod_base = OTHER; note = 2'-O-methylguanosine-3'-phosphate
  modified_base 7: mod_base = OTHER; note = guanosine-2'-phosphate
  modified_base 8: mod_base = OTHER; note = 2'-O-methylguanosine-3'-phosphate
  modified_base 9: mod_base = OTHER; note = 2'-O-methyluridine-3'-phosphate
  modified_base 10: mod_base = OTHER; note = 2'-O-methylguanosine-3'-phosphate
  modified_base 11: mod_base = OTHER; note = 2'-O-methyladenosine-3'-phosphate
  modified_base 12: mod_base = OTHER; note = 2'-O-methyladenosine-3'-phosphate
  modified_base 13: mod_base = OTHER; note = 2'-O-methylcytidine-3'-phosphate
  modified_base 14: mod_base = OTHER; note = 2'-deoxy-2'-fluoroadenosine-3'-phosphate
  modified_base 15: mod_base = OTHER; note = 2'-O-methyladenosine-3'-phosphate
  modified_base 16: mod_base = OTHER; note = 2'-deoxy-2'-fluoroguanosine-3'-phosphate
  modified_base 17: mod_base = OTHER; note = 2'-O-methyladenosine-3'-phosphate
  modified_base 18: mod_base = OTHER; note = 2'-O-methyladenosine-3'-phosphate
  modified_base 19: mod_base = OTHER; note = 2'-O-methyladenosine-3'-phosphate
  modified_base 20: mod_base = OTHER; note = 2'-O-methyladenosine-3'-phosphate
  modified_base 21: mod_base = OTHER; note = 2'-O-methylguanosine-3'-phosphorothioate
  modified_base 22: mod_base = OTHER; note = 2'-O-methyladenosine-3'-phosphorothioate
  modified_base 23: mod_base = OTHER; note = 2'-O-methylcytidine
tctgagggtgaacaagaaaagac

SEQ ID NO: 451 - RNA, 23 nt, synthetic construct
  source 1..23: mol_type = other RNA
  modified_base 1: mod_base = OTHER; note = 2'-O-methyluridine-3'-phosphorothioate 5'-(E)-Vinylphosphonate
  modified_base 2: mod_base = OTHER; note = 2'-deoxy-2'-fluoroguanosine-3'-phosphorothioate
  modified_base 3: mod_base = OTHER; note = 2'-O-methylcytidine-3'-phosphate
  modified_base 4: mod_base = OTHER; note = 2'-O-methyluridine-3'-phosphate
  modified_base 5: mod_base = OTHER; note = 2'-O-methylguanosine-3'-phosphate
  modified_base 6: mod_base = OTHER; note = 2'-O-methyladenosine-3'-phosphate
  modified_base 7: mod_base = OTHER; note = guanosine-2'-phosphate
  modified_base 8: mod_base = OTHER; note = 2'-O-methylguanosine-3'-phosphate
  modified_base 9: mod_base = OTHER; note = 2'-O-methylguanosine-3'-phosphate
  modified_base 10: mod_base = OTHER; note = 2'-O-methyluridine-3'-phosphate
  modified_base 11: mod_base = OTHER; note = 2'-O-methylguanosine-3'-phosphate
  modified_base 12: mod_base = OTHER; note = 2'-O-methyladenosine-3'-phosphate
  modified_base 13: mod_base = OTHER; note = 2'-O-methyladenosine-3'-phosphate
  modified_base 14: mod_base = OTHER; note = 2'-deoxy-2'-fluorocytidine-3'-phosphate
  modified_base 15: mod_base = OTHER; note = 2'-O-methyladenosine-3'-phosphate
  modified_base 16: mod_base = OTHER; note = 2'-deoxy-2'-fluoroadenosine-3'-phosphate
  modified_base 17: mod_base = OTHER; note = 2'-O-methylguanosine-3'-phosphate
  modified_base 18: mod_base = OTHER; note = 2'-O-methyladenosine-3'-phosphate
  modified_base 19: mod_base = OTHER; note = 2'-O-methyladenosine-3'-phosphate
  modified_base 20: mod_base = OTHER; note = 2'-O-methyladenosine-3'-phosphate
  modified_base 21: mod_base = OTHER; note = 2'-O-methyladenosine-3'-phosphorothioate
  modified_base 22: mod_base = OTHER; note = 2'-O-methylguanosine-3'-phosphorothioate
  modified_base 23: mod_base = OTHER; note = 2'-O-methyladenosine
tgctgagggtgaacaagaaaaga

SEQ ID NO: 452 - RNA, 23 nt, synthetic construct
  source 1..23: mol_type = other RNA
  modified_base 1: mod_base = OTHER; note = 2'-O-methyluridine-3'-phosphorothioate 5'-(E)-Vinylphosphonate
  modified_base 2: mod_base = OTHER; note = 2'-deoxy-2'-fluorouridine-3'-phosphorothioate
  modified_base 3: mod_base = OTHER; note = 2'-O-methylcytidine-3'-phosphate
  modified_base 4: mod_base = OTHER; note = 2'-O-methylguanosine-3'-phosphate
  modified_base 5: mod_base = OTHER; note = 2'-O-methylcytidine-3'-phosphate
  modified_base 6: mod_base = OTHER; note = 2'-O-methyluridine-3'-phosphate
  modified_base 7: mod_base = OTHER; note = guanosine-2'-phosphate
  modified_base 8: mod_base = OTHER; note = 2'-O-methyladenosine-3'-phosphate
  modified_base 9: mod_base = OTHER; note = 2'-O-methylguanosine-3'-phosphate
  modified_base 10: mod_base = OTHER; note = 2'-O-methylguanosine-3'-phosphate
  modified_base 11: mod_base = OTHER; note = 2'-O-methylguanosine-3'-phosphate
  modified_base 12: mod_base = OTHER; note = 2'-O-methyluridine-3'-phosphate
  modified_base 13: mod_base = OTHER; note = 2'-O-methylguanosine-3'-phosphate
  modified_base 14: mod_base = OTHER; note = 2'-deoxy-2'-fluoroadenosine-3'-phosphate
  modified_base 15: mod_base = OTHER; note = 2'-O-methyladenosine-3'-phosphate
  modified_base 16: mod_base = OTHER; note = 2'-deoxy-2'-fluorocytidine-3'-phosphate
  modified_base 17: mod_base = OTHER; note = 2'-O-methyladenosine-3'-phosphate
  modified_base 18: mod_base = OTHER; note = 2'-O-methyladenosine-3'-phosphate
  modified_base 19: mod_base = OTHER; note = 2'-O-methylguanosine-3'-phosphate
  modified_base 20: mod_base = OTHER; note = 2'-O-methyladenosine-3'-phosphate
  modified_base 21: mod_base = OTHER; note = 2'-O-methyladenosine-3'-phosphorothioate
  modified_base 22: mod_base = OTHER; note = 2'-O-methyladenosine-3'-phosphorothioate
  modified_base 23: mod_base = OTHER; note = 2'-O-methyladenosine
ttcgctgagggtgaacaagaaaa

SEQ ID NO: 453 - RNA, 23 nt, synthetic construct
  source 1..23: mol_type = other RNA
  modified_base 1: mod_base = OTHER; note = 2'-O-methyluridine-3'-phosphorothioate 5'-(E)-Vinylphosphonate
  modified_base 2: mod_base = OTHER; note = 2'-deoxy-2'-fluorouridine-3'-phosphorothioate
  modified_base 3: mod_base = OTHER; note = 2'-O-methylcytidine-3'-phosphate
  modified_base 4: mod_base = OTHER; note = 2'-O-methyluridine-3'-phosphate
  modified_base 5: mod_base = OTHER; note = 2'-O-methylcytidine-3'-phosphate
  modified_base 6: mod_base = OTHER; note = 2'-O-methyladenosine-3'-phosphate
  modified_base 7: mod_base = OTHER; note = cytidine-2'-phosphate
  modified_base 8: mod_base = OTHER; note = 2'-O-methyladenosine-3'-phosphate
  modified_base 9: mod_base = OTHER; note = 2'-O-methylguanosine-3'-phosphate
  modified_base 10: mod_base = OTHER; note = 2'-O-methyluridine-3'-phosphate
  modified_base 11: mod_base = OTHER; note = 2'-O-methyladenosine-3'-phosphate
  modified_base 12: mod_base = OTHER; note = 2'-O-methylcytidine-3'-phosphate
  modified_base 13: mod_base = OTHER; note = 2'-O-methyluridine-3'-phosphate
  modified_base 14: mod_base = OTHER; note = 2'-deoxy-2'-fluorocytidine-3'-phosphate
  modified_base 15: mod_base = OTHER; note = 2'-O-methylguanosine-3'-phosphate
  modified_base 16: mod_base = OTHER; note = 2'-deoxy-2'-fluorocytidine-3'-phosphate
  modified_base 17: mod_base = OTHER; note = 2'-O-methyluridine-3'-phosphate
  modified_base 18: mod_base = OTHER; note = 2'-O-methylguanosine-3'-phosphate
  modified_base 19: mod_base = OTHER; note = 2'-O-methyladenosine-3'-phosphate
  modified_base 20: mod_base = OTHER; note = 2'-O-methylguanosine-3'-phosphate
  modified_base 21: mod_base = OTHER; note = 2'-O-methylguanosine-3'-phosphorothioate
  modified_base 22: mod_base = OTHER; note = 2'-O-methylguanosine-3'-phosphorothioate
  modified_base 23: mod_base = OTHER; note = 2'-O-methyluridine
ttctcacagtactcgctgagggt

SEQ ID NO: 454 - RNA, 23 nt, synthetic construct
  source 1..23: mol_type = other RNA
  modified_base 1: mod_base = OTHER; note = 2'-O-methyluridine-3'-phosphorothioate 5'-(E)-Vinylphosphonate
  modified_base 2: mod_base = OTHER; note = 2'-deoxy-2'-fluoroguanosine-3'-phosphorothioate
  modified_base 3: mod_base = OTHER; note = 2'-O-methylcytidine-3'-phosphate
  modified_base 4: mod_base = OTHER; note = 2'-O-methyluridine-3'-phosphate
  modified_base 5: mod_base = OTHER; note = 2'-O-methylcytidine-3'-phosphate
  modified_base 6: mod_base = OTHER; note = 2'-O-methyluridine-3'-phosphate
  modified_base 7: mod_base = OTHER; note = cytidine-2'-phosphate
  modified_base 8: mod_base = OTHER; note = 2'-O-methyladenosine-3'-phosphate
  modified_base 9: mod_base = OTHER; note = 2'-O-methylcytidine-3'-phosphate
  modified_base 10: mod_base = OTHER; note = 2'-O-methyladenosine-3'-phosphate
  modified_base 11: mod_base = OTHER; note = 2'-O-methylguanosine-3'-phosphate
  modified_base 12: mod_base = OTHER; note = 2'-O-methyluridine-3'-phosphate
  modified_base 13: mod_base = OTHER; note = 2'-O-methyladenosine-3'-phosphate
  modified_base 14: mod_base = OTHER; note = 2'-deoxy-2'-fluorocytidine-3'-phosphate
  modified_base 15: mod_base = OTHER; note = 2'-O-methyluridine-3'-phosphate
  modified_base 16: mod_base = OTHER; note = 2'-deoxy-2'-fluorocytidine-3'-phosphate
  modified_base 17: mod_base = OTHER; note = 2'-O-methylguanosine-3'-phosphate
  modified_base 18: mod_base = OTHER; note = 2'-O-methylcytidine-3'-phosphate
  modified_base 19: mod_base = OTHER; note = 2'-O-methyluridine-3'-phosphate
  modified_base 20: mod_base = OTHER; note = 2'-O-methylguanosine-3'-phosphate
  modified_base 21: mod_base = OTHER; note = 2'-O-methyladenosine-3'-phosphorothioate
  modified_base 22: mod_base = OTHER; note = 2'-O-methylguanosine-3'-phosphorothioate
  modified_base 23: mod_base = OTHER; note = 2'-O-methylguanosine
tgctctcacagtactcgctgagg

SEQ ID NO: 455 - RNA, 23 nt, synthetic construct
  source 1..23: mol_type = other RNA
  modified_base 1: mod_base = OTHER; note = 2'-O-methyluridine-3'-phosphorothioate 5'-(E)-Vinylphosphonate
  modified_base 2: mod_base = OTHER; note = 2'-deoxy-2'-fluorouridine-3'-phosphorothioate
  modified_base 3: mod_base = OTHER; note = 2'-O-methylguanosine-3'-phosphate
  modified_base 4: mod_base = OTHER; note = 2'-O-methylcytidine-3'-phosphate
  modified_base 5: mod_base = OTHER; note = 2'-O-methyluridine-3'-phosphate
  modified_base 6: mod_base = OTHER; note = 2'-O-methylcytidine-3'-phosphate
  modified_base 7: mod_base = OTHER; note = Thymidine-glycol nucleic acid (GNA), S-Isomer
  modified_base 8: mod_base = OTHER; note = 2'-O-methylcytidine-3'-phosphate
  modified_base 9: mod_base = OTHER; note = 2'-O-methyladenosine-3'-phosphate
  modified_base 10: mod_base = OTHER; note = 2'-O-methylcytidine-3'-phosphate
  modified_base 11: mod_base = OTHER; note = 2'-O-methyladenosine-3'-phosphate
  modified_base 12: mod_base = OTHER; note = 2'-O-methylguanosine-3'-phosphate
  modified_base 13: mod_base = OTHER; note = 2'-O-methyluridine-3'-phosphate
  modified_base 14: mod_base = OTHER; note = 2'-deoxy-2'-fluoroadenosine-3'-phosphate
  modified_base 15: mod_base = OTHER; note = 2'-O-methylcytidine-3'-phosphate
  modified_base 16: mod_base = OTHER; note = 2'-deoxy-2'-fluorouridine-3'-phosphate
  modified_base 17: mod_base = OTHER; note = 2'-O-methylcytidine-3'-phosphate
  modified_base 18: mod_base = OTHER; note = 2'-O-methylguanosine-3'-phosphate
  modified_base 19: mod_base = OTHER; note = 2'-O-methylcytidine-3'-phosphate
  modified_base 20: mod_base = OTHER; note = 2'-O-methyluridine-3'-phosphate
  modified_base 21: mod_base = OTHER; note = 2'-O-methylguanosine-3'-phosphorothioate
  modified_base 22: mod_base = OTHER; note = 2'-O-methyladenosine-3'-phosphorothioate
  modified_base 23: mod_base = OTHER; note = 2'-O-methylguanosine
ttgctctcacagtactcgctgag

SEQ ID NO: 456 - RNA, 23 nt, synthetic construct
  source 1..23: mol_type = other RNA
  modified_base 1: mod_base = OTHER; note = 2'-O-methyluridine-3'-phosphorothioate 5'-(E)-Vinylphosphonate
  modified_base 2: mod_base = OTHER; note = 2'-deoxy-2'-fluorouridine-3'-phosphorothioate
  modified_base 3: mod_base = OTHER; note = 2'-O-methyluridine-3'-phosphate
  modified_base 4: mod_base = OTHER; note = 2'-O-methylguanosine-3'-phosphate
  modified_base 5: mod_base = OTHER; note = 2'-O-methylcytidine-3'-phosphate
  modified_base 6: mod_base = OTHER; note = 2'-O-methyluridine-3'-phosphate
  modified_base 7: mod_base = OTHER; note = cytidine-2'-phosphate
  modified_base 8: mod_base = OTHER; note = 2'-O-methyluridine-3'-phosphate
  modified_base 9: mod_base = OTHER; note = 2'-O-methylcytidine-3'-phosphate
  modified_base 10: mod_base = OTHER; note = 2'-O-methyladenosine-3'-phosphate
  modified_base 11: mod_base = OTHER; note = 2'-O-methylcytidine-3'-phosphate
  modified_base 12: mod_base = OTHER; note = 2'-O-methyladenosine-3'-phosphate
  modified_base 13: mod_base = OTHER; note = 2'-O-methylguanosine-3'-phosphate
  modified_base 14: mod_base = OTHER; note = 2'-deoxy-2'-fluorouridine-3'-phosphate
  modified_base 15: mod_base = OTHER; note = 2'-O-methyladenosine-3'-phosphate
  modified_base 16: mod_base = OTHER; note = 2'-deoxy-2'-fluorocytidine-3'-phosphate
  modified_base 17: mod_base = OTHER; note = 2'-O-methyluridine-3'-phosphate
  modified_base 18: mod_base = OTHER; note = 2'-O-methylcytidine-3'-phosphate
  modified_base 19: mod_base = OTHER; note = 2'-O-methylguanosine-3'-phosphate
  modified_base 20: mod_base = OTHER; note = 2'-O-methylcytidine-3'-phosphate
  modified_base 21: mod_base = OTHER; note = 2'-O-methyluridine-3'-phosphorothioate
  modified_base 22: mod_base = OTHER; note = 2'-O-methylguanosine-3'-phosphorothioate
  modified_base 23: mod_base = OTHER; note = 2'-O-methyladenosine
tttgctctcacagtactcgctga

SEQ ID NO: 457 - RNA, 23 nt, synthetic construct
  source 1..23: mol_type = other RNA
  modified_base 1: mod_base = OTHER; note = 2'-O-methyluridine-3'-phosphorothioate 5'-(E)-Vinylphosphonate
  modified_base 2: mod_base = OTHER; note = 2'-deoxy-2'-fluorocytidine-3'-phosphorothioate
  modified_base 3: mod_base = OTHER; note = 2'-O-methyluridine-3'-phosphate
  modified_base 4: mod_base = OTHER; note = 2'-O-methyluridine-3'-phosphate
  modified_base 5: mod_base = OTHER; note = 2'-O-methylguanosine-3'-phosphate
  modified_base 6: mod_base = OTHER; note = 2'-O-methylcytidine-3'-phosphate
  modified_base 7: mod_base = OTHER; note = Thymidine-glycol nucleic acid (GNA), S-Isomer
  modified_base 8: mod_base = OTHER; note = 2'-O-methylcytidine-3'-phosphate
  modified_base 9: mod_base = OTHER; note = 2'-O-methyluridine-3'-phosphate
  modified_base 10: mod_base = OTHER; note = 2'-O-methylcytidine-3'-phosphate
  modified_base 11: mod_base = OTHER; note = 2'-O-methyladenosine-3'-phosphate
  modified_base 12: mod_base = OTHER; note = 2'-O-methylcytidine-3'-phosphate
  modified_base 13: mod_base = OTHER; note = 2'-O-methyladenosine-3'-phosphate
  modified_base 14: mod_base = OTHER; note = 2'-deoxy-2'-fluoroguanosine-3'-phosphate
  modified_base 15: mod_base = OTHER; note = 2'-O-methyluridine-3'-phosphate
  modified_base 16: mod_base = OTHER; note = 2'-deoxy-2'-fluoroadenosine-3'-phosphate
  modified_base 17: mod_base = OTHER; note = 2'-O-methylcytidine-3'-phosphate
  modified_base 18: mod_base = OTHER; note = 2'-O-methyluridine-3'-phosphate
  modified_base 19: mod_base = OTHER; note = 2'-O-methylcytidine-3'-phosphate
  modified_base 20: mod_base = OTHER; note = 2'-O-methylguanosine-3'-phosphate
  modified_base 21: mod_base = OTHER; note = 2'-O-methylcytidine-3'-phosphorothioate
  modified_base 22: mod_base = OTHER; note = 2'-O-methyluridine-3'-phosphorothioate
  modified_base 23: mod_base = OTHER; note = 2'-O-methylguanosine
tcttgctctcacagtactcgctg

SEQ ID NO: 458 - RNA, 23 nt, synthetic construct
  source 1..23: mol_type = other RNA
  modified_base 1: mod_base = OTHER; note = 2'-O-methyluridine-3'-phosphorothioate 5'-(E)-Vinylphosphonate
  modified_base 2: mod_base = OTHER; note = 2'-deoxy-2'-fluoroadenosine-3'-phosphorothioate
  modified_base 3: mod_base = OTHER; note = 2'-O-methylcytidine-3'-phosphate
  modified_base 4: mod_base = OTHER; note = 2'-O-methyluridine-3'-phosphate
  modified_base 5: mod_base = OTHER; note = 2'-O-methyluridine-3'-phosphate
  modified_base 6: mod_base = OTHER; note = 2'-O-methylguanosine-3'-phosphate
  modified_base 7: mod_base = OTHER; note = cytidine-2'-phosphate
  modified_base 8: mod_base = OTHER; note = 2'-O-methyluridine-3'-phosphate
  modified_base 9: mod_base = OTHER; note = 2'-O-methylcytidine-3'-phosphate
  modified_base 10: mod_base = OTHER; note = 2'-O-methyluridine-3'-phosphate
  modified_base 11: mod_base = OTHER; note = 2'-O-methylcytidine-3'-phosphate
  modified_base 12: mod_base = OTHER; note = 2'-O-methyladenosine-3'-phosphate
  modified_base 13: mod_base = OTHER; note = 2'-O-methylcytidine-3'-phosphate
  modified_base 14: mod_base = OTHER; note = 2'-deoxy-2'-fluoroadenosine-3'-phosphate
  modified_base 15: mod_base = OTHER; note = 2'-O-methylguanosine-3'-phosphate
  modified_base 16: mod_base = OTHER; note = 2'-deoxy-2'-fluorouridine-3'-phosphate
  modified_base 17: mod_base = OTHER; note = 2'-O-methyladenosine-3'-phosphate
  modified_base 18: mod_base = OTHER; note = 2'-O-methylcytidine-3'-phosphate
  modified_base 19: mod_base = OTHER; note = 2'-O-methyluridine-3'-phosphate
  modified_base 20: mod_base = OTHER; note = 2'-O-methylcytidine-3'-phosphate
  modified_base 21: mod_base = OTHER; note = 2'-O-methylguanosine-3'-phosphorothioate
  modified_base 22: mod_base = OTHER; note = 2'-O-methylcytidine-3'-phosphorothioate
  modified_base 23: mod_base = OTHER; note = 2'-O-methyluridine
tacttgctctcacagtactcgct

SEQ ID NO: 459 - RNA, 23 nt, synthetic construct
  source 1..23: mol_type = other RNA
  modified_base 1: mod_base = OTHER; note = 2'-O-methyluridine-3'-phosphorothioate 5'-(E)-Vinylphosphonate
  modified_base 2: mod_base = OTHER; note = 2'-deoxy-2'-fluorouridine-3'-phosphorothioate
  modified_base 3: mod_base = OTHER; note = 2'-O-methyladenosine-3'-phosphate
  modified_base 4: mod_base = OTHER; note = 2'-O-methylcytidine-3'-phosphate
  modified_base 5: mod_base = OTHER; note = 2'-O-methyluridine-3'-phosphate
  modified_base 6: mod_base = OTHER; note = 2'-O-methyluridine-3'-phosphate
  modified_base 7: mod_base = OTHER; note = guanosine-2'-phosphate
  modified_base 8: mod_base = OTHER; note = 2'-O-methylcytidine-3'-phosphate
  modified_base 9: mod_base = OTHER; note = 2'-O-methyluridine-3'-phosphate
  modified_base 10: mod_base = OTHER; note = 2'-O-methylcytidine-3'-phosphate
  modified_base 11: mod_base = OTHER; note = 2'-O-methyluridine-3'-phosphate
  modified_base 12: mod_base = OTHER; note = 2'-O-methylcytidine-3'-phosphate
  modified_base 13: mod_base = OTHER; note = 2'-O-methyladenosine-3'-phosphate
  modified_base 14: mod_base = OTHER; note = 2'-deoxy-2'-fluorocytidine-3'-phosphate
  modified_base 15: mod_base = OTHER; note = 2'-O-methyladenosine-3'-phosphate
  modified_base 16: mod_base = OTHER; note = 2'-deoxy-2'-fluoroguanosine-3'-phosphate
  modified_base 17: mod_base = OTHER; note = 2'-O-methyluridine-3'-phosphate
  modified_base 18: mod_base = OTHER; note = 2'-O-methyladenosine-3'-phosphate
  modified_base 19: mod_base = OTHER; note = 2'-O-methylcytidine-3'-phosphate
  modified_base 20: mod_base = OTHER; note = 2'-O-methyluridine-3'-phosphate
  modified_base 21: mod_base = OTHER; note = 2'-O-methylcytidine-3'-phosphorothioate
  modified_base 22: mod_base = OTHER; note = 2'-O-methylguanosine-3'-phosphorothioate
  modified_base 23: mod_base = OTHER; note = 2'-O-methylcytidine
ttacttgctctcacagtactcgc

SEQ ID NO: 460 - RNA, 23 nt, synthetic construct
  source 1..23: mol_type = other RNA
  modified_base 1: mod_base = OTHER; note = 2'-O-methyluridine-3'-phosphorothioate 5'-(E)-Vinylphosphonate
  modified_base 2: mod_base = OTHER; note = 2'-deoxy-2'-fluorocytidine-3'-phosphorothioate
  modified_base 3: mod_base = OTHER; note = 2'-O-methyluridine-3'-phosphate
  modified_base 4: mod_base = OTHER; note = 2'-O-methyladenosine-3'-phosphate
  modified_base 5: mod_base = OTHER; note = 2'-O-methylcytidine-3'-phosphate
  modified_base 6: mod_base = OTHER; note = 2'-deoxy-2'-fluorouridine-3'-phosphate
  modified_base 7: mod_base = OTHER; note = 2'-O-methyluridine-3'-phosphate
  modified_base 8: mod_base = OTHER; note = 2'-deoxy-2'-fluoroguanosine-3'-phosphate
  modified_base 9: mod_base = OTHER; note = 2'-deoxy-2'-fluorocytidine-3'-phosphate
  modified_base 10: mod_base = OTHER; note = 2'-O-methyluridine-3'-phosphate
  modified_base 11: mod_base = OTHER; note = 2'-O-methylcytidine-3'-phosphate
  modified_base 12: mod_base = OTHER; note = 2'-O-methyluridine-3'-phosphate
  modified_base 13: mod_base = OTHER; note = 2'-O-methylcytidine-3'-phosphate
  modified_base 14: mod_base = OTHER; note = 2'-deoxy-2'-fluoroadenosine-3'-phosphate
  modified_base 15: mod_base = OTHER; note = 2'-O-methylcytidine-3'-phosphate
  modified_base 16: mod_base = OTHER; note = 2'-deoxy-2'-fluoroadenosine-3'-phosphate
  modified_base 17: mod_base = OTHER; note = 2'-O-methylguanosine-3'-phosphate
  modified_base 18: mod_base = OTHER; note = 2'-O-methyluridine-3'-phosphate
  modified_base 19: mod_base = OTHER; note = 2'-O-methyladenosine-3'-phosphate
  modified_base 20: mod_base = OTHER; note = 2'-O-methylcytidine-3'-phosphate
  modified_base 21: mod_base = OTHER; note = 2'-O-methyluridine-3'-phosphorothioate
  modified_base 22: mod_base = OTHER; note = 2'-O-methylcytidine-3'-phosphorothioate
  modified_base 23: mod_base = OTHER; note = 2'-O-methylguanosine
tctacttgctctcacagtactcg

SEQ ID NO: 461 - RNA, 23 nt, synthetic construct
  source 1..23: mol_type = other RNA
  modified_base 1: mod_base = OTHER; note = 2'-O-methyluridine-3'-phosphorothioate 5'-(E)-Vinylphosphonate
  modified_base 2: mod_base = OTHER; note = 2'-deoxy-2'-fluorocytidine-3'-phosphorothioate
  modified_base 3: mod_base = OTHER; note = 2'-O-methyladenosine-3'-phosphate
  modified_base 4: mod_base = OTHER; note = 2'-O-methylcytidine-3'-phosphate
  modified_base 5: mod_base = OTHER; note = 2'-O-methyluridine-3'-phosphate
  modified_base 6: mod_base = OTHER; note = 2'-deoxy-2'-fluoroadenosine-3'-phosphate
  modified_base 7: mod_base = OTHER; note = 2'-O-methylcytidine-3'-phosphate
  modified_base 8: mod_base = OTHER; note = 2'-deoxy-2'-fluorouridine-3'-phosphate
  modified_base 9: mod_base = OTHER; note = 2'-deoxy-2'-fluorouridine-3'-phosphate
  modified_base 10: mod_base = OTHER; note = 2'-O-methylguanosine-3'-phosphate
  modified_base 11: mod_base = OTHER; note = 2'-O-methylcytidine-3'-phosphate
  modified_base 12: mod_base = OTHER; note = 2'-O-methyluridine-3'-phosphate
  modified_base 13: mod_base = OTHER; note = 2'-O-methylcytidine-3'-phosphate
  modified_base 14: mod_base = OTHER; note = 2'-deoxy-2'-fluorouridine-3'-phosphate
  modified_base 15: mod_base = OTHER; note = 2'-O-methylcytidine-3'-phosphate
  modified_base 16: mod_base = OTHER; note = 2'-deoxy-2'-fluoroadenosine-3'-phosphate
  modified_base 17: mod_base = OTHER; note = 2'-O-methylcytidine-3'-phosphate
  modified_base 18: mod_base = OTHER; note = 2'-O-methyladenosine-3'-phosphate
  modified_base 19: mod_base = OTHER; note = 2'-O-methylguanosine-3'-phosphate
  modified_base 20: mod_base = OTHER; note = 2'-O-methyluridine-3'-phosphate
  modified_base 21: mod_base = OTHER; note = 2'-O-methyladenosine-3'-phosphorothioate
  modified_base 22: mod_base = OTHER; note = 2'-O-methylcytidine-3'-phosphorothioate
  modified_base 23: mod_base = OTHER; note = 2'-O-methyluridine
tcactacttgctctcacagtact

SEQ ID NO: 462 - RNA, 23 nt, synthetic construct
  source 1..23: mol_type = other RNA
  modified_base 1: mod_base = OTHER; note = 2'-O-methyluridine-3'-phosphorothioate 5'-(E)-Vinylphosphonate
  modified_base 2: mod_base = OTHER; note = 2'-deoxy-2'-fluoroguanosine-3'-phosphorothioate
  modified_base 3: mod_base = OTHER; note = 2'-O-methyladenosine-3'-phosphate
  modified_base 4: mod_base = OTHER; note = 2'-O-methylguanosine-3'-phosphate
  modified_base 5: mod_base = OTHER; note = 2'-O-methylguanosine-3'-phosphate
  modified_base 6: mod_base = OTHER; note = 2'-O-methyluridine-3'-phosphate
  modified_base 7: mod_base = OTHER; note = guanosine-2'-phosphate
  modified_base 8: mod_base = OTHER; note = 2'-O-methyluridine-3'-phosphate
  modified_base 9: mod_base = OTHER; note = 2'-O-methylguanosine-3'-phosphate
  modified_base 10: mod_base = OTHER; note = 2'-O-methyluridine-3'-phosphate
  modified_base 11: mod_base = OTHER; note = 2'-O-methylguanosine-3'-phosphate
  modified_base 12: mod_base = OTHER; note = 2'-O-methyluridine-3'-phosphate
  modified_base 13: mod_base = OTHER; note = 2'-O-methyluridine-3'-phosphate
  modified_base 14: mod_base = OTHER; note = 2'-deoxy-2'-fluorouridine-3'-phosphate
  modified_base 15: mod_base = OTHER; note = 2'-O-methyluridine-3'-phosphate
  modified_base 16: mod_base = OTHER; note = 2'-deoxy-2'-fluorouridine-3'-phosphate
  modified_base 17: mod_base = OTHER; note = 2'-O-methylguanosine-3'-phosphate
  modified_base 18: mod_base = OTHER; note = 2'-O-methyluridine-3'-phosphate
  modified_base 19: mod_base = OTHER; note = 2'-O-methyluridine-3'-phosphate
  modified_base 20: mod_base = OTHER; note = 2'-O-methyluridine-3'-phosphate
  modified_base 21: mod_base = OTHER; note = 2'-O-methyluridine-3'-phosphorothioate
  modified_base 22: mod_base = OTHER; note = 2'-O-methyluridine-3'-phosphorothioate
  modified_base 23: mod_base = OTHER; note = 2'-O-methylcytidine
tgaggtgtgtgtttttgtttttc

SEQ ID NO: 463 - RNA, 23 nt, synthetic construct
  source 1..23: mol_type = other RNA
  modified_base 1: mod_base = OTHER; note = 2'-O-methyluridine-3'-phosphorothioate 5'-(E)-Vinylphosphonate
  modified_base 2: mod_base = OTHER; note = 2'-deoxy-2'-fluoroguanosine-3'-phosphorothioate
  modified_base 3: mod_base = OTHER; note = 2'-O-methylguanosine-3'-phosphate
  modified_base 4: mod_base = OTHER; note = 2'-O-methyluridine-3'-phosphate
  modified_base 5: mod_base = OTHER; note = 2'-O-methylguanosine-3'-phosphate
  modified_base 6: mod_base = OTHER; note = 2'-O-methyluridine-3'-phosphate
  modified_base 7: mod_base = OTHER; note = guanosine-2'-phosphate
  modified_base 8: mod_base = OTHER; note = 2'-O-methylguanosine-3'-phosphate
  modified_base 9: mod_base = OTHER; note = 2'-O-methylguanosine-3'-phosphate
  modified_base 10: mod_base = OTHER; note = 2'-O-methyluridine-3'-phosphate
  modified_base 11: mod_base = OTHER; note = 2'-O-methyluridine-3'-phosphate
  modified_base 12: mod_base = OTHER; note = 2'-O-methyluridine-3'-phosphate
  modified_base 13: mod_base = OTHER; note = 2'-O-methyladenosine-3'-phosphate
  modified_base 14: mod_base = OTHER; note = 2'-deoxy-2'-fluoroguanosine-3'-phosphate
  modified_base 15: mod_base = OTHER; note = 2'-O-methylguanosine-3'-phosphate
  modified_base 16: mod_base = OTHER; note = 2'-deoxy-2'-fluoroadenosine-3'-phosphate
  modified_base 17: mod_base = OTHER; note = 2'-O-methylguanosine-3'-phosphate
  modified_base 18: mod_base = OTHER; note = 2'-O-methylguanosine-3'-phosphate
  modified_base 19: mod_base = OTHER; note = 2'-O-methyluridine-3'-phosphate
  modified_base 20: mod_base = OTHER; note = 2'-O-methylguanosine-3'-phosphate
  modified_base 21: mod_base = OTHER; note = 2'-O-methyluridine-3'-phosphorothioate
  modified_base 22: mod_base = OTHER; note = 2'-O-methylguanosine-3'-phosphorothioate
  modified_base 23: mod_base = OTHER; note = 2'-O-methyluridine
tggtgtgggtttaggaggtgtgt

SEQ ID NO: 464 - RNA, 23 nt, synthetic construct
  source 1..23: mol_type = other RNA
  modified_base 1: mod_base = OTHER; note = 2'-O-methyluridine-3'-phosphorothioate 5'-(E)-Vinylphosphonate
  modified_base 2: mod_base = OTHER; note = 2'-deoxy-2'-fluorocytidine-3'-phosphorothioate
  modified_base 3: mod_base = OTHER; note = 2'-O-methyladenosine-3'-phosphate
  modified_base 4: mod_base = OTHER; note = 2'-O-methylguanosine-3'-phosphate
  modified_base 5: mod_base = OTHER; note = 2'-O-methylguanosine-3'-phosphate
  modified_base 6: mod_base = OTHER; note = 2'-O-methyluridine-3'-phosphate
  modified_base 7: mod_base = OTHER; note = guanosine-2'-phosphate
  modified_base 8: mod_base = OTHER; note = 2'-O-methyluridine-3'-phosphate
  modified_base 9: mod_base = OTHER; note = 2'-O-methylguanosine-3'-phosphate
  modified_base 10: mod_base = OTHER; note = 2'-O-methylguanosine-3'-phosphate
  modified_base 11: mod_base = OTHER; note = 2'-O-methylguanosine-3'-phosphate
  modified_base 12: mod_base = OTHER; note = 2'-O-methyluridine-3'-phosphate
  modified_base 13: mod_base = OTHER; note = 2'-O-methyluridine-3'-phosphate
  modified_base 14: mod_base = OTHER; note = 2'-deoxy-2'-fluorouridine-3'-phosphate
  modified_base 15: mod_base = OTHER; note = 2'-O-methyladenosine-3'-phosphate
  modified_base 16: mod_base = OTHER; note = 2'-deoxy-2'-fluoroguanosine-3'-phosphate
  modified_base 17: mod_base = OTHER; note = 2'-O-methylguanosine-3'-phosphate
  modified_base 18: mod_base = OTHER; note = 2'-O-methyladenosine-3'-phosphate
  modified_base 19: mod_base = OTHER; note = 2'-O-methylguanosine-3'-phosphate
  modified_base 20: mod_base = OTHER; note = 2'-O-methylguanosine-3'-phosphate
  modified_base 21: mod_base = OTHER; note = 2'-O-methyluridine-3'-phosphorothioate
  modified_base 22: mod_base = OTHER; note = 2'-O-methylguanosine-3'-phosphorothioate
  modified_base 23: mod_base = OTHER; note = 2'-O-methyluridine
tcaggtgtgggtttaggaggtgt

SEQ ID NO: 465 - RNA, 23 nt, synthetic construct
  source 1..23: mol_type = other RNA
  modified_base 1: mod_base = OTHER; note = 2'-O-methyluridine-3'-phosphorothioate 5'-(E)-Vinylphosphonate
  modified_base 2: mod_base = OTHER; note = 2'-deoxy-2'-fluoroadenosine-3'-phosphorothioate
  modified_base 3: mod_base = OTHER; note = 2'-O-methylguanosine-3'-phosphate
  modified_base 4: mod_base = OTHER; note = 2'-O-methylcytidine-3'-phosphate
  modified_base 5: mod_base = OTHER; note = 2'-O-methyladenosine-3'-phosphate
  modified_base 6: mod_base = OTHER; note = 2'-O-methylguanosine-3'-phosphate
  modified_base 7: mod_base = OTHER; note = guanosine-2'-phosphate
  modified_base 8: mod_base = OTHER; note = 2'-O-methyluridine-3'-phosphate
  modified_base 9: mod_base = OTHER; note = 2'-O-methylguanosine-3'-phosphate
  modified_base 10: mod_base = OTHER; note = 2'-O-methyluridine-3'-phosphate
  modified_base 11: mod_base = OTHER; note = 2'-O-methylguanosine-3'-phosphate
  modified_base 12: mod_base = OTHER; note = 2'-O-methylguanosine-3'-phosphate
  modified_base 13: mod_base = OTHER; note = 2'-O-methylguanosine-3'-phosphate
  modified_base 14: mod_base = OTHER; note = 2'-deoxy-2'-fluorouridine-3'-phosphate
  modified_base 15: mod_base = OTHER; note = 2'-O-methyluridine-3'-phosphate
  modified_base 16: mod_base = OTHER; note = 2'-deoxy-2'-fluorouridine-3'-phosphate
  modified_base 17: mod_base = OTHER; note = 2'-O-methyladenosine-3'-phosphate
  modified_base 18: mod_base = OTHER; note = 2'-O-methylguanosine-3'-phosphate
  modified_base 19: mod_base = OTHER; note = 2'-O-methylguanosine-3'-phosphate
  modified_base 20: mod_base = OTHER; note = 2'-O-methyladenosine-3'-phosphate
  modified_base 21: mod_base = OTHER; note = 2'-O-methylguanosine-3'-phosphorothioate
  modified_base 22: mod_base = OTHER; note = 2'-O-methylguanosine-3'-phosphorothioate
  modified_base 23: mod_base = OTHER; note = 2'-O-methyluridine
tagcaggtgtgggtttaggaggt

SEQ ID NO: 466 - RNA, 23 nt, synthetic construct
  source 1..23: mol_type = other RNA
  modified_base 1: mod_base = OTHER; note = 2'-O-methyluridine-3'-phosphorothioate 5'-(E)-Vinylphosphonate
  modified_base 2: mod_base = OTHER; note = 2'-deoxy-2'-fluorouridine-3'-phosphorothioate
  modified_base 3: mod_base = OTHER; note = 2'-O-methylcytidine-3'-phosphate
  modified_base 4: mod_base = OTHER; note = 2'-O-methyluridine-3'-phosphate
  modified_base 5: mod_base = OTHER; note = 2'-O-methyladenosine-3'-phosphate
  modified_base 6: mod_base = OTHER; note = 2'-O-methylguanosine-3'-phosphate
  modified_base 7: mod_base = OTHER; note = cytidine-2'-phosphate
  modified_base 8: mod_base = OTHER; note = 2'-O-methyladenosine-3'-phosphate
  modified_base 9: mod_base = OTHER; note = 2'-O-methyladenosine-3'-phosphate
  modified_base 10: mod_base = OTHER; note = 2'-O-methylguanosine-3'-phosphate
  modified_base 11: mod_base = OTHER; note = 2'-O-methyladenosine-3'-phosphate
  modified_base 12: mod_base = OTHER; note = 2'-O-methylguanosine-3'-phosphate
  modified_base 13: mod_base = OTHER; note = 2'-O-methylcytidine-3'-phosphate
  modified_base 14: mod_base = OTHER; note = 2'-deoxy-2'-fluoroadenosine-3'-phosphate
  modified_base 15: mod_base = OTHER; note = 2'-O-methylguanosine-3'-phosphate
  modified_base 16: mod_base = OTHER; note = 2'-deoxy-2'-fluoroguanosine-3'-phosphate
  modified_base 17: mod_base = OTHER; note = 2'-O-methyluridine-3'-phosphate
  modified_base 18: mod_base = OTHER; note = 2'-O-methylguanosine-3'-phosphate
  modified_base 19: mod_base = OTHER; note = 2'-O-methyluridine-3'-phosphate
  modified_base 20: mod_base = OTHER; note = 2'-O-methylguanosine-3'-phosphate
  modified_base 21: mod_base = OTHER; note = 2'-O-methylguanosine-3'-phosphorothioate
  modified_base 22: mod_base = OTHER; note = 2'-O-methylguanosine-3'-phosphorothioate
  modified_base 23: mod_base = OTHER; note = 2'-O-methyluridine
ttctagcaagagcaggtgtgggt

SEQ ID NO: 467 - RNA, 23 nt, synthetic construct
  source 1..23: mol_type = other RNA
  modified_base 1: mod_base = OTHER; note = 2'-O-methyluridine-3'-phosphorothioate 5'-(E)-Vinylphosphonate
  modified_base 2: mod_base = OTHER; note = 2'-deoxy-2'-fluoroguanosine-3'-phosphorothioate
  modified_base 3: mod_base = OTHER; note = 2'-O-methyluridine-3'-phosphate
  modified_base 4: mod_base = OTHER; note = 2'-O-methylcytidine-3'-phosphate
  modified_base 5: mod_base = OTHER; note = 2'-O-methyluridine-3'-phosphate
  modified_base 6: mod_base = OTHER; note = 2'-O-methyladenosine-3'-phosphate
  modified_base 7: mod_base = OTHER; note = guanosine-2'-phosphate
  modified_base 8: mod_base = OTHER; note = 2'-O-methylcytidine-3'-phosphate
  modified_base 9: mod_base = OTHER; note = 2'-O-methyladenosine-3'-phosphate
  modified_base 10: mod_base = OTHER; note = 2'-O-methyladenosine-3'-phosphate
  modified_base 11: mod_base = OTHER; note = 2'-O-methylguanosine-3'-phosphate
  modified_base 12: mod_base = OTHER; note = 2'-O-methyladenosine-3'-phosphate
  modified_base 13: mod_base = OTHER; note = 2'-O-methylguanosine-3'-phosphate
  modified_base 14: mod_base = OTHER; note = 2'-deoxy-2'-fluorocytidine-3'-phosphate
  modified_base 15: mod_base = OTHER; note = 2'-O-methyladenosine-3'-phosphate
  modified_base 16: mod_base = OTHER; note = 2'-deoxy-2'-fluoroguanosine-3'-phosphate
  modified_base 17: mod_base = OTHER; note = 2'-O-methylguanosine-3'-phosphate
  modified_base 18: mod_base = OTHER; note = 2'-O-methyluridine-3'-phosphate
  modified_base 19: mod_base = OTHER; note = 2'-O-methylguanosine-3'-phosphate
  modified_base 20: mod_base = OTHER; note = 2'-O-methyluridine-3'-phosphate
  modified_base 21: mod_base = OTHER; note = 2'-O-methylguanosine-3'-phosphorothioate
  modified_base 22: mod_base = OTHER; note = 2'-O-methylguanosine-3'-phosphorothioate
  modified_base 23: mod_base = OTHER; note = 2'-O-methylguanosine
tgtctagcaagagcaggtgtggg

SEQ ID NO: 468 - RNA, 23 nt, synthetic construct
  source 1..23: mol_type = other RNA
  modified_base 1: mod_base = OTHER; note = 2'-O-methyluridine-3'-phosphorothioate 5'-(E)-Vinylphosphonate
  modified_base 2: mod_base = OTHER; note = 2'-deoxy-2'-fluoroguanosine-3'-phosphorothioate
  modified_base 3: mod_base = OTHER; note = 2'-O-methylguanosine-3'-phosphate
  modified_base 4: mod_base = OTHER; note = 2'-O-methyluridine-3'-phosphate
  modified_base 5: mod_base = OTHER; note = 2'-O-methylcytidine-3'-phosphate
  modified_base 6: mod_base = OTHER; note = 2'-O-methyluridine-3'-phosphate
  modified_base 7: mod_base = OTHER; note = Adenosine-glycol nucleic acid (GNA), S-isomer
  modified_base 8: mod_base = OTHER; note = 2'-O-methylguanosine-3'-phosphate
  modified_base 9: mod_base = OTHER; note = 2'-O-methylcytidine-3'-phosphate
  modified_base 10: mod_base = OTHER; note = 2'-O-methyladenosine-3'-phosphate
  modified_base 11: mod_base = OTHER; note = 2'-O-methyladenosine-3'-phosphate
  modified_base 12: mod_base = OTHER; note = 2'-O-methylguanosine-3'-phosphate
  modified_base 13: mod_base = OTHER; note = 2'-O-methyladenosine-3'-phosphate
  modified_base 14: mod_base = OTHER; note = 2'-deoxy-2'-fluoroguanosine-3'-phosphate
  modified_base 15: mod_base = OTHER; note = 2'-O-methylcytidine-3'-phosphate
  modified_base 16: mod_base = OTHER; note = 2'-deoxy-2'-fluoroadenosine-3'-phosphate
  modified_base 17: mod_base = OTHER; note = 2'-O-methylguanosine-3'-phosphate
  modified_base 18: mod_base = OTHER; note = 2'-O-methylguanosine-3'-phosphate
  modified_base 19: mod_base = OTHER; note = 2'-O-methyluridine-3'-phosphate
  modified_base 20: mod_base = OTHER; note = 2'-O-methylguanosine-3'-phosphate
  modified_base 21: mod_base = OTHER; note = 2'-O-methyluridine-3'-phosphorothioate
  modified_base 22: mod_base = OTHER; note = 2'-O-methylguanosine-3'-phosphorothioate
  modified_base 23: mod_base = OTHER; note = 2'-O-methylguanosine
tggtctagcaagagcaggtgtgg

SEQ ID NO: 469 - RNA, 23 nt, synthetic construct
  source 1..23: mol_type = other RNA
acccgaggctcccttttctcgag

SEQ ID NO: 470 - RNA, 23 nt, synthetic construct
  source 1..23: mol_type = other RNA
gcaggcaattccaccagtcgcta

SEQ ID NO: 471 - RNA, 23 nt, synthetic construct
  source 1..23: mol_type = other RNA
tccaccagtcgctagaggcgaaa

SEQ ID NO: 472 - RNA, 23 nt, synthetic construct
  source 1..23: mol_type = other RNA
ccaccagtcgctagaggcgaaag

SEQ ID NO: 473 - RNA, 23 nt, synthetic construct
  source 1..23: mol_type = other RNA
gacacccagcttcggtcagagaa

SEQ ID NO: 474 - RNA, 23 nt, synthetic construct
  source 1..23: mol_type = other RNA
cacccagcttcggtcagagaaat

SEQ ID NO: 475 - RNA, 23 nt, synthetic construct
  source 1..23: mol_type = other RNA
cccagcttcggtcagagaaatga

SEQ ID NO: 476 - RNA, 23 nt, synthetic construct
  source 1..23: mol_type = other RNA
cagcttcggtcagagaaatgaga

SEQ ID NO: 477 - RNA, 23 nt, synthetic construct
  source 1..23: mol_type = other RNA
cttcggtcagagaaatgagaggg

SEQ ID NO: 478 - RNA, 23 nt, synthetic construct
  source 1..23: mol_type = other RNA
tcggtcagagaaatgagagggaa

SEQ ID NO: 479 - RNA, 23 nt, synthetic construct
  source 1..23: mol_type = other RNA
ggtcagagaaatgagagggaaag

SEQ ID NO: 480 - RNA, 23 nt, synthetic construct
  source 1..23: mol_type = other RNA
tgagagggaaagtaaaaatgcgt

SEQ ID NO: 481 - RNA, 23 nt, synthetic construct
  source 1..23: mol_type = other RNA
gagagggaaagtaaaaatgcgtc

SEQ ID NO: 482 - RNA, 23 nt, synthetic construct
  source 1..23: mol_type = other RNA
agagggaaagtaaaaatgcgtcg

SEQ ID NO: 483 - RNA, 23 nt, synthetic construct
  source 1..23: mol_type = other RNA
gagggaaagtaaaaatgcgtcga

SEQ ID NO: 484 - RNA, 23 nt, synthetic construct
  source 1..23: mol_type = other RNA
agggaaagtaaaaatgcgtcgag

SEQ ID NO: 485 - RNA, 23 nt, synthetic construct
  source 1..23: mol_type = other RNA
gggaaagtaaaaatgcgtcgagc

SEQ ID NO: 486 - RNA, 23 nt, synthetic construct
  source 1..23: mol_type = other RNA
ggaaagtaaaaatgcgtcgagct

SEQ ID NO: 487 - RNA, 23 nt, synthetic construct
  source 1..23: mol_type = other RNA
gaaagtaaaaatgcgtcgagctc

SEQ ID NO: 488 - RNA, 23 nt, synthetic construct
  source 1..23: mol_type = other RNA
aaagtaaaaatgcgtcgagctct

SEQ ID NO: 489 - RNA, 23 nt, synthetic construct
  source 1..23: mol_type = other RNA
cgcgactcctgagttccagagct

SEQ ID NO: 490 - RNA, 23 nt, synthetic construct
  source 1..23: mol_type = other RNA
gcgactcctgagttccagagctt

SEQ ID NO: 491 - RNA, 23 nt, synthetic construct
  source 1..23: mol_type = other RNA
cgactcctgagttccagagcttg

SEQ ID NO: 492 - RNA, 23 nt, synthetic construct
  source 1..23: mol_type = other RNA
gactcctgagttccagagcttgc

SEQ ID NO: 493 - RNA, 23 nt, synthetic construct
  source 1..23: mol_type = other RNA
actcctgagttccagagcttgct

SEQ ID NO: 494 - RNA, 23 nt, synthetic construct
  source 1..23: mol_type = other RNA
ctcctgagttccagagcttgcta

SEQ ID NO: 495 - RNA, 23 nt, synthetic construct
  source 1..23: mol_type = other RNA
ctgagttccagagcttgctacag

SEQ ID NO: 496 - RNA, 23 nt, synthetic construct
  source 1..23: mol_type = other RNA
tgagttccagagcttgctacagg

SEQ ID NO: 497 - RNA, 23 nt, synthetic construct
  source 1..23: mol_type = other RNA
gagttccagagcttgctacaggc

SEQ ID NO: 498 - RNA, 23 nt, synthetic construct
  source 1..23: mol_type = other RNA
agttccagagcttgctacaggct

SEQ ID NO: 499 - RNA, 23 nt, synthetic construct
  source 1..23: mol_type = other RNA
gttccagagcttgctacaggctg

SEQ ID NO: 500 - RNA, 23 nt, synthetic construct
  source 1..23: mol_type = other RNA
ttccagagcttgctacaggctgc

SEQ ID NO: 501 - RNA, 23 nt, synthetic construct
  source 1..23: mol_type = other RNA
tccagagcttgctacaggctgcg

SEQ ID NO: 502 - RNA, 23 nt, synthetic construct
  source 1..23: mol_type = other RNA
gctacaggctgcggttgtttccc

SEQ ID NO: 503 - RNA, 23 nt, synthetic construct
  source 1..23: mol_type = other RNA
aggctgcggttgtttccctcctt

SEQ ID NO: 504 - RNA, 23 nt, synthetic construct
  source 1..23: mol_type = other RNA
ggctgcggttgtttccctccttg

SEQ ID NO: 505 - RNA, 23 nt, synthetic construct
  source 1..23: mol_type = other RNA
ctgcggttgtttccctccttgtt

SEQ ID NO: 506 - RNA, 23 nt, synthetic construct
  source 1..23: mol_type = other RNA
tgcggttgtttccctccttgttt

SEQ ID NO: 507 - RNA, 23 nt, synthetic construct
  source 1..23: mol_type = other RNA
cggttgtttccctccttgttttc

SEQ ID NO: 508 - RNA, 23 nt, synthetic construct
  source 1..23: mol_type = other RNA
ggttgtttccctccttgttttct

SEQ ID NO: 509 - RNA, 23 nt, synthetic construct
  source 1..23: mol_type = other RNA
gtttccctccttgttttcttctg

SEQ ID NO: 510 - RNA, 23 nt, synthetic construct
  source 1..23: mol_type = other RNA
tttccctccttgttttcttctgg

SEQ ID NO: 511 - RNA, 23 nt, synthetic construct
  source 1..23: mol_type = other RNA
ttccctccttgttttcttctggt

SEQ ID NO: 512 - RNA, 23 nt, synthetic construct
  source 1..23: mol_type = other RNA
tccctccttgttttcttctggtt

SEQ ID NO: 513 - RNA, 23 nt, synthetic construct
  source 1..23: mol_type = other RNA
ccctccttgttttcttctggtta

SEQ ID NO: 514 - RNA, 23 nt, synthetic construct
  source 1..23: mol_type = other RNA
ctccttgttttcttctggttaat

SEQ ID NO: 515 - RNA, 23 nt, synthetic construct
  source 1..23: mol_type = other RNA
tccttgttttcttctggttaatc

SEQ ID NO: 516 - RNA, 23 nt, synthetic construct
  source 1..23: mol_type = other RNA
ccttgttttcttctggttaatct

SEQ ID NO: 517 - RNA, 23 nt, synthetic construct
  source 1..23: mol_type = other RNA
cttgttttcttctggttaatctt

SEQ ID NO: 518 - RNA, 23 nt, synthetic construct
  source 1..23: mol_type = other RNA
ttgttttcttctggttaatcttt

SEQ ID NO: 519 - RNA, 23 nt, synthetic construct
  source 1..23: mol_type = other RNA
ttttcttctggttaatctttatc

SEQ ID NO: 520 - RNA, 23 nt, synthetic construct
  source 1..23: mol_type = other RNA
tttcttctggttaatctttatca

SEQ ID NO: 521 - RNA, 23 nt, synthetic construct
  source 1..23: mol_type = other RNA
ttcttctggttaatctttatcag

SEQ ID NO: 522 - RNA, 23 nt, synthetic construct
  source 1..23: mol_type = other RNA
tcttctggttaatctttatcagg

SEQ ID NO: 523 - RNA, 23 nt, synthetic construct
  source 1..23: mol_type = other RNA
cttctggttaatctttatcaggt

SEQ ID NO: 524 - RNA, 23 nt, synthetic construct
  source 1..23: mol_type = other RNA
ttctggttaatctttatcaggtc

SEQ ID NO: 525 - RNA, 23 nt, synthetic construct
  source 1..23: mol_type = other RNA
tctggttaatctttatcaggtct

SEQ ID NO: 526 - RNA, 23 nt, synthetic construct
  source 1..23: mol_type = other RNA
tggttaatctttatcaggtcttt

SEQ ID NO: 527 - RNA, 23 nt, synthetic construct
  source 1..23: mol_type = other RNA
ggttaatctttatcaggtctttt

SEQ ID NO: 528 - RNA, 23 nt, synthetic construct
  source 1..23: mol_type = other RNA
ttaatctttatcaggtcttttct

SEQ ID NO: 529 - RNA, 23 nt, synthetic construct
  source 1..23: mol_type = other RNA
taatctttatcaggtcttttctt

SEQ ID NO: 530 - RNA, 23 nt, synthetic construct
  source 1..23: mol_type = other RNA
aatctttatcaggtcttttcttg

SEQ ID NO: 531 - RNA, 23 nt, synthetic construct
  source 1..23: mol_type = other RNA
atctttatcaggtcttttcttgt

SEQ ID NO: 532 - RNA, 23 nt, synthetic construct
  source 1..23: mol_type = other RNA
tctttatcaggtcttttcttgtt

SEQ ID NO: 533 - RNA, 23 nt, synthetic construct
  source 1..23: mol_type = other RNA
ctttatcaggtcttttcttgttc

SEQ ID NO: 534 - RNA, 23 nt, synthetic construct
  source 1..23: mol_type = other RNA
tttatcaggtcttttcttgttca

SEQ ID NO: 535 - RNA, 23 nt, synthetic construct
  source 1..23: mol_type = other RNA
ttatcaggtcttttcttgttcac

SEQ ID NO: 536 - RNA, 23 nt, synthetic construct
  source 1..23: mol_type = other RNA
tatcaggtcttttcttgttcacc

SEQ ID NO: 537 - RNA, 23 nt, synthetic construct
  source 1..23: mol_type = other RNA
atcaggtcttttcttgttcaccc

SEQ ID NO: 538 - RNA, 23 nt, synthetic construct
  source 1..23: mol_type = other RNA
caggtcttttcttgttcaccctc

SEQ ID NO: 539 - RNA, 23 nt, synthetic construct
  source 1..23: mol_type = other RNA
ggtcttttcttgttcaccctcag

SEQ ID NO: 540 - RNA, 23 nt, synthetic construct
  source 1..23: mol_type = other RNA
gtcttttcttgttcaccctcagc

SEQ ID NO: 541 - RNA, 23 nt, synthetic construct
  source 1..23: mol_type = other RNA
tcttttcttgttcaccctcagcg

SEQ ID NO: 542 - RNA, 23 nt, synthetic construct
  source 1..23: mol_type = other RNA
ttttcttgttcaccctcagcgag

SEQ ID NO: 543 - RNA, 23 nt, synthetic construct
  source 1..23: mol_type = other RNA
accctcagcgagtactgtgagag

SEQ ID NO: 544 - RNA, 23 nt, synthetic construct
  source 1..23: mol_type = other RNA
cctcagcgagtactgtgagagca

SEQ ID NO: 545 - RNA, 23 nt, synthetic construct
  source 1..23: mol_type = other RNA
ctcagcgagtactgtgagagcaa

SEQ ID NO: 546 - RNA, 23 nt, synthetic construct
  source 1..23: mol_type = other RNA
tcagcgagtactgtgagagcaag

SEQ ID NO: 547 - RNA, 23 nt, synthetic construct
  source 1..23: mol_type = other RNA
cagcgagtactgtgagagcaagt

SEQ ID NO: 548 - RNA, 23 nt, synthetic construct
  source 1..23: mol_type = other RNA
agcgagtactgtgagagcaagta

SEQ ID NO: 549 - RNA, 23 nt, synthetic construct
  source 1..23: mol_type = other RNA
gcgagtactgtgagagcaagtag

SEQ ID NO: 550 - RNA, 23 nt, synthetic construct
  source 1..23: mol_type = other RNA
cgagtactgtgagagcaagtagt

SEQ ID NO: 551 - RNA, 23 nt, synthetic construct
  source 1..23: mol_type = other RNA
agtactgtgagagcaagtagtgg

SEQ ID NO: 552 - RNA, 23 nt, synthetic construct
  source 1..23: mol_type = other RNA
gaaaaacaaaaacacacacctcc

SEQ ID NO: 553 - RNA, 23 nt, synthetic construct
  source 1..23: mol_type = other RNA
acacacctcctaaacccacacct

SEQ ID NO: 554 - RNA, 23 nt, synthetic construct
  source 1..23: mol_type = other RNA
acacctcctaaacccacacctgc

SEQ ID NO: 555 - RNA, 23 nt, synthetic construct
  source 1..23: mol_type = other RNA
acctcctaaacccacacctgctc

SEQ ID NO: 556 - RNA, 23 nt, synthetic construct
  source 1..23: mol_type = other RNA
acccacacctgctcttgctagac

SEQ ID NO: 557 - RNA, 23 nt, synthetic construct
  source 1..23: mol_type = other RNA
cccacacctgctcttgctagacc

SEQ ID NO: 558 - RNA, 23 nt, synthetic construct
  source 1..23: mol_type = other RNA
ccacacctgctcttgctagaccc

SEQ ID NO: 559 - RNA, 21 nt, synthetic construct
  source 1..21: mol_type = other RNA
gtaacctacggtgtcccgcta

SEQ ID NO: 560 - RNA, 21 nt, synthetic construct
  source 1..21: mol_type = other RNA
gtcccgctaggaaagagagga

SEQ ID NO: 561 - RNA, 21 nt, synthetic construct
  source 1..21: mol_type = other RNA
cccgctaggaaagagaggtga

SEQ ID NO: 562 - RNA, 21 nt, synthetic construct
  source 1..21: mol_type = other RNA
cgctaggaaagagaggtgcga

SEQ ID NO: 563 - RNA, 21 nt, synthetic construct
  source 1..21: mol_type = other RNA
gctaggaaagagaggtgcgta

SEQ ID NO: 564 - RNA, 21 nt, synthetic construct
  source 1..21: mol_type = other RNA
taggaaagagaggtgcgtcaa

SEQ ID NO: 565 - RNA, 21 nt, synthetic construct
  source 1..21: mol_type = other RNA
aggtgcgtcaaacagcgacaa

SEQ ID NO: 566 - RNA, 21 nt, synthetic construct
  source 1..21: mol_type = other RNA
ggtgcgtcaaacagcgacaaa

SEQ ID NO: 567 - RNA, 21 nt, synthetic construct
  source 1..21: mol_type = other RNA
gtgcgtcaaacagcgacaaga

SEQ ID NO: 568 - RNA, 21 nt, synthetic construct
  source 1..21: mol_type = other RNA
tgcgtcaaacagcgacaagta

SEQ ID NO: 569 - RNA, 21 nt, synthetic construct
  source 1..21: mol_type = other RNA
gcgtcaaacagcgacaagtta

SEQ ID NO: 570 - RNA, 21 nt, synthetic construct
  source 1..21: mol_type = other RNA
cgtcaaacagcgacaagttca

SEQ ID NO: 571 - RNA, 21 nt, synthetic construct
  source 1..21: mol_type = other RNA
gtcaaacagcgacaagttcca

SEQ ID NO: 572 - RNA, 21 nt, synthetic construct
  source 1..21: mol_type = other RNA
tcaaacagcgacaagttccga

SEQ ID NO: 573 - RNA, 21 nt, synthetic construct
  source 1..21: mol_type = other RNA
ccgcccacgtaaaagatgaca

SEQ ID NO: 574 - RNA, 21 nt, synthetic construct
  source 1..21: mol_type = other RNA
ccacgtaaaagatgacgctta

SEQ ID NO: 575 - RNA, 21 nt, synthetic construct
  source 1..21: mol_type = other RNA
cacgtaaaagatgacgcttga

SEQ ID NO: 576 - RNA, 21 nt, synthetic construct
  source 1..21: mol_type = other RNA
acgtaaaagatgacgcttgga

SEQ ID NO: 577 - RNA, 21 nt, synthetic construct
  source 1..21: mol_type = other RNA
cgtaaaagatgacgcttggta

SEQ ID NO: 578 - RNA, 21 nt, synthetic construct
  source 1..21: mol_type = other RNA
gtaaaagatgacgcttggtga

SEQ ID NO: 579 - RNA, 21 nt, synthetic construct
  source 1..21: mol_type = other RNA
taaaagatgacgcttggtgta

SEQ ID NO: 580 - RNA, 21 nt, synthetic construct
  source 1..21: mol_type = other RNA
aaaagatgacgcttggtgtga

SEQ ID NO: 581 - RNA, 21 nt, synthetic construct
  source 1..21: mol_type = other RNA
aaagatgacgcttggtgtgta

SEQ ID NO: 582 - RNA, 21 nt, synthetic construct
  source 1..21: mol_type = other RNA
agatgacgcttggtgtgtcaa

SEQ ID NO: 583 - RNA, 21 nt, synthetic construct
  source 1..21: mol_type = other RNA
atgacgcttggtgtgtcagca

SEQ ID NO: 584 - RNA, 21 nt, synthetic construct
  source 1..21: mol_type = other RNA
gacgcttggtgtgtcagccga

SEQ ID NO: 585 - RNA, 21 nt, synthetic construct
  source 1..21: mol_type = other RNA
gctgcccggttgcttctctta

SEQ ID NO: 586 - RNA, 21 nt, synthetic construct
  source 1..21: mol_type = other RNA
gtctagcaagagcaggtgtga

SEQ ID NO: 587 - RNA, 21 nt, synthetic construct
  source 1..21: mol_type = other RNA
gcaggtgtgggtttaggagga

SEQ ID NO: 588 - RNA, 21 nt, synthetic construct
  source 1..21: mol_type = other RNA
caggtgtgggtttaggaggta

SEQ ID NO: 589 - RNA, 21 nt, synthetic construct
  source 1..21: mol_type = other RNA
aggtgtgggtttaggaggtga

SEQ ID NO: 590 - RNA, 21 nt, synthetic construct
  source 1..21: mol_type = other RNA
gtgtgggtttaggaggtgtga

SEQ ID NO: 591 - RNA, 21 nt, synthetic construct
  source 1..21: mol_type = other RNA
tgctctcacagtactcgctga

SEQ ID NO: 592 - RNA, 21 nt, synthetic construct
  source 1..21: mol_type = other RNA
tctcacagtactcgctgagga

SEQ ID NO: 593 - RNA, 21 nt, synthetic construct
  source 1..21: mol_type = other RNA
tcacagtactcgctgagggta

SEQ ID NO: 594 - RNA, 21 nt, synthetic construct
  source 1..21: mol_type = other RNA
gctgagggtgaacaagaaaaa

SEQ ID NO: 595 - RNA, 21 nt, synthetic construct
  source 1..21: mol_type = other RNA
aacaagaaaagacctgataaa

SEQ ID NO: 596 - RNA, 21 nt, synthetic construct
  source 1..21: mol_type = other RNA
aagaaaagacctgataaagaa

SEQ ID NO: 597 - RNA, 21 nt, synthetic construct
  source 1..21: mol_type = other RNA
agaaaagacctgataaagata

SEQ ID NO: 598 - RNA, 21 nt, synthetic construct
  source 1..21: mol_type = other RNA
gaaaagacctgataaagatta

SEQ ID NO: 599 - RNA, 21 nt, synthetic construct
  source 1..21: mol_type = other RNA
aaaagacctgataaagattaa

SEQ ID NO: 600 - RNA, 21 nt, synthetic construct
  source 1..21: mol_type = other RNA
aaagacctgataaagattaaa

SEQ ID NO: 601 - RNA, 21 nt, synthetic construct
  source 1..21: mol_type = other RNA
aagacctgataaagattaaca

SEQ ID NO: 602 - RNA, 21 nt, synthetic construct
  source 1..21: mol_type = other RNA
gacctgataaagattaaccaa

SEQ ID NO: 603 - RNA, 21 nt, synthetic construct
  source 1..21: mol_type = other RNA
acctgataaagattaaccaga

SEQ ID NO: 604 - RNA, 21 nt, synthetic construct
  source 1..21: mol_type = other RNA
aaagattaaccagaagaaaaa

SEQ ID NO: 605 - RNA, 21 nt, synthetic construct
  source 1..21: mol_type = other RNA
attaaccagaagaaaacaaga

SEQ ID NO: 606 - RNA, 21 nt, synthetic construct
  source 1..21: mol_type = other RNA
aaccagaagaaaacaaggaga

SEQ ID NO: 607 - RNA, 21 nt, synthetic construct
  source 1..21: mol_type = other RNA
ggagggaaacaaccgcagcca

SEQ ID NO: 608 - RNA, 21 nt, synthetic construct
  source 1..21: mol_type = other RNA
gagggaaacaaccgcagccta

SEQ ID NO: 609 - RNA, 21 nt, synthetic construct
  source 1..21: mol_type = other RNA
cagcctgtagcaagctctgga

SEQ ID NO: 610 - RNA, 21 nt, synthetic construct
  source 1..21: mol_type = other RNA
ctctggaactcaggagtcgca

SEQ ID NO: 611 - RNA, 21 nt, synthetic construct
  source 1..21: mol_type = other RNA
tctcctcagagctcgacgcaa

SEQ ID NO: 612 - RNA, 21 nt, synthetic construct
  source 1..21: mol_type = other RNA
tcctcagagctcgacgcatta

SEQ ID NO: 613 - RNA, 21 nt, synthetic construct
  source 1..21: mol_type = other RNA
actttccctctcatttctcta

SEQ ID NO: 614 - RNA, 21 nt, synthetic construct
  source 1..21: mol_type = other RNA
ctttccctctcatttctctga

SEQ ID NO: 615 - RNA, 21 nt, synthetic construct
  source 1..21: mol_type = other RNA
tttccctctcatttctctgaa

SEQ ID NO: 616 - RNA, 21 nt, synthetic construct
  source 1..21: mol_type = other RNA
tccctctcatttctctgacca

SEQ ID NO: 617 - RNA, 21 nt, synthetic construct
  source 1..21: mol_type = other RNA
ccctctcatttctctgaccga

SEQ ID NO: 618 - RNA, 21 nt, synthetic construct
  source 1..21: mol_type = other RNA
cctctcatttctctgaccgaa

SEQ ID NO: 619 - RNA, 21 nt, synthetic construct
  source 1..21: mol_type = other RNA
tctcatttctctgaccgaaga

SEQ ID NO: 620 - RNA, 21 nt, synthetic construct
  source 1..21: mol_type = other RNA
ctcatttctctgaccgaagca

SEQ ID NO: 621 - RNA, 21 nt, synthetic construct
  source 1..21: mol_type = other RNA
tcatttctctgaccgaagcta

SEQ ID NO: 622 - RNA, 21 nt, synthetic construct
  source 1..21: mol_type = other RNA
ctctgaccgaagctgggtgta

SEQ ID NO: 623 - RNA, 21 nt, synthetic construct
  source 1..21: mol_type = other RNA
ggtgtcgggctttcgcctcta

SEQ ID NO: 624 - RNA, 21 nt, synthetic construct
  source 1..21: mol_type = other RNA
tcgggctttcgcctctagcga

SEQ ID NO: 625 - RNA, 21 nt, synthetic construct
  source 1..21: mol_type = other RNA
ctttcgcctctagcgactgga

SEQ ID NO: 626 - RNA, 21 nt, synthetic construct
  source 1..21: mol_type = other RNA
ttcgcctctagcgactggtga

SEQ ID NO: 627 - RNA, 21 nt, synthetic construct
  source 1..21: mol_type = other RNA
tcgcctctagcgactggtgga

SEQ ID NO: 628 - RNA, 21 nt, synthetic construct
  source 1..21: mol_type = other RNA
cgcctctagcgactggtggaa

SEQ ID NO: 629 - RNA, 21 nt, synthetic construct
  source 1..21: mol_type = other RNA
gcctctagcgactggtggaaa

SEQ ID NO: 630 - RNA, 21 nt, synthetic construct
  source 1..21: mol_type = other RNA
ctctagcgactggtggaatta

SEQ ID NO: 631 - RNA, 21 nt, synthetic construct
  source 1..21: mol_type = other RNA
tctagcgactggtggaattga

SEQ ID NO: 632 - RNA, 21 nt, synthetic construct
  source 1..21: mol_type = other RNA
gactggtggaattgcctgcaa

SEQ ID NO: 633 - RNA, 21 nt, synthetic construct
  source 1..21: mol_type = other RNA
actggtggaattgcctgcata

SEQ ID NO: 634 - RNA, 21 nt, synthetic construct
  source 1..21: mol_type = other RNA
tggtggaattgcctgcatcca

SEQ ID NO: 635 - RNA, 21 nt, synthetic construct
  source 1..21: mol_type = other RNA
tctggcctcttccttgcttta

SEQ ID NO: 636 - RNA, 21 nt, synthetic construct
  source 1..21: mol_type = other RNA
ctggcctcttccttgctttca

SEQ ID NO: 637 - RNA, 21 nt, synthetic construct
  source 1..21: mol_type = other RNA
tggcctcttccttgctttcca

SEQ ID NO: 638 - RNA, 21 nt, synthetic construct
  source 1..21: mol_type = other RNA
ggcctcttccttgctttccca

SEQ ID NO: 639 - RNA, 21 nt, synthetic construct
  source 1..21: mol_type = other RNA
gcctcttccttgctttcccga

SEQ ID NO: 640 - RNA, 21 nt, synthetic construct
  source 1..21: mol_type = other RNA
ttccttgctttcccgccctca

SEQ ID NO: 641 - RNA, 21 nt, synthetic construct
  source 1..21: mol_type = other RNA
tccttgctttcccgccctcaa

SEQ ID NO: 642 - RNA, 21 nt, synthetic construct
  source 1..21: mol_type = other RNA
ccttgctttcccgccctcaga

SEQ ID NO: 643 - RNA, 21 nt, synthetic construct
  source 1..21: mol_type = other RNA
cttgctttcccgccctcagta

SEQ ID NO: 644 - RNA, 21 nt, synthetic construct
  source 1..21: mol_type = other RNA
agtacccgagctgtctcctta

SEQ ID NO: 645 - RNA, 21 nt, synthetic construct
  source 1..21: mol_type = other RNA
tacccgagctgtctccttcca

SEQ ID NO: 646 - RNA, 21 nt, synthetic construct
  source 1..21: mol_type = other RNA
gaggagatcatgcgggatgaa

SEQ ID NO: 647 - RNA, 21 nt, synthetic construct
  source 1..21: mol_type = other RNA
agacgcctgcacaatttcaga

SEQ ID NO: 648 - RNA, 21 nt, synthetic construct
  source 1..21: mol_type = other RNA
gacgcctgcacaatttcagca

SEQ ID NO: 649 - RNA, 21 nt, synthetic construct
  source 1..21: mol_type = other RNA
cgcctgcacaatttcagccca

SEQ ID NO: 650 - RNA, 21 nt, synthetic construct
  source 1..21: mol_type = other RNA
cctgcacaatttcagcccaaa

SEQ ID NO: 651 - RNA, 21 nt, synthetic construct
  source 1..21: mol_type = other RNA
ctgcacaatttcagcccaaga

SEQ ID NO: 652 - RNA, 21 nt, synthetic construct
  source 1..21: mol_type = other RNA
tgcacaatttcagcccaagca

SEQ ID NO: 653 - RNA, 21 nt, synthetic construct
  source 1..21: mol_type = other RNA
caatttcagcccaagcttcta

SEQ ID NO: 654 - RNA, 21 nt, synthetic construct
  source 1..21: mol_type = other RNA
aatttcagcccaagcttctaa

SEQ ID NO: 655 - RNA, 21 nt, synthetic construct
  source 1..21: mol_type = other RNA
cagcccaagcttctagagaga

SEQ ID NO: 656 - RNA, 21 nt, synthetic construct
  source 1..21: mol_type = other RNA
agcccaagcttctagagagta

SEQ ID NO: 657 - RNA, 21 nt, synthetic construct
  source 1..21: mol_type = other RNA
gcccaagcttctagagagtga

SEQ ID NO: 658 - RNA, 21 nt, synthetic construct
  source 1..21: mol_type = other RNA
cccaagcttctagagagtgga

SEQ ID NO: 659 - RNA, 21 nt, synthetic construct
  source 1..21: mol_type = other RNA
ccaagcttctagagagtggta

SEQ ID NO: 660 - RNA, 21 nt, synthetic construct
  source 1..21: mol_type = other RNA
caagcttctagagagtggtga

SEQ ID NO: 661 - RNA, 21 nt, synthetic construct
  source 1..21: mol_type = other RNA
aagcttctagagagtggtgaa

SEQ ID NO: 662 - RNA, 21 nt, synthetic construct
  source 1..21: mol_type = other RNA
agcttctagagagtggtgata

SEQ ID NO: 663 - RNA, 21 nt, synthetic construct
  source 1..21: mol_type = other RNA
gcttctagagagtggtgatga

SEQ ID NO: 664 - RNA, 21 nt, synthetic construct
  source 1..21: mol_type = other RNA
ttctagagagtggtgatgaca

SEQ ID NO: 665 - RNA, 21 nt, synthetic construct
  source 1..21: mol_type = other RNA
tagagagtggtgatgacttga

SEQ ID NO: 666 - RNA, 21 nt, synthetic construct
  source 1..21: mol_type = other RNA
agagagtggtgatgacttgca

SEQ ID NO: 667 - RNA, 21 nt, synthetic construct
  source 1..21: mol_type = other RNA
gagagtggtgatgacttgcaa

SEQ ID NO: 668 - RNA, 21 nt, synthetic construct
  source 1..21: mol_type = other RNA
agtggtgatgacttgcatata

SEQ ID NO: 669 - RNA, 21 nt, synthetic construct
  source 1..21: mol_type = other RNA
ggtgatgacttgcatatgaga

SEQ ID NO: 670 - RNA, 21 nt, synthetic construct
  source 1..21: mol_type = other RNA
gtgatgacttgcatatgagga

SEQ ID NO: 671 - RNA, 21 nt, synthetic construct
  source 1..21: mol_type = other RNA
tgatgacttgcatatgaggga

SEQ ID NO: 672 - RNA, 21 nt, synthetic construct
  source 1..21: mol_type = other RNA
agggcagcaatgcaagtcgga

SEQ ID NO: 673 - RNA, 21 nt, synthetic construct
  source 1..21: mol_type = other RNA
gggcagcaatgcaagtcggta

SEQ ID NO: 674 - RNA, 21 nt, synthetic construct
  source 1..21: mol_type = other RNA
ggcagcaatgcaagtcggtga

SEQ ID NO: 675 - RNA, 21 nt, synthetic construct
  source 1..21: mol_type = other RNA
gcagcaatgcaagtcggtgta

SEQ ID NO: 676 - RNA, 21 nt, synthetic construct
  source 1..21: mol_type = other RNA
cagcaatgcaagtcggtgtga

SEQ ID NO: 677 - RNA, 21 nt, synthetic construct
  source 1..21: mol_type = other RNA
caatgcaagtcggtgtgctca

SEQ ID NO: 678 - RNA, 21 nt, synthetic construct
  source 1..21: mol_type = other RNA
ctgtgggacatgacctggtta

SEQ ID NO: 679 - RNA, 21 nt, synthetic construct
  source 1..21: mol_type = other RNA
tgtgggacatgacctggttga

SEQ ID NO: 680 - RNA, 21 nt, synthetic construct
  source 1..21: mol_type = other RNA
gtgggacatgacctggttgca

SEQ ID NO: 681 - RNA, 21 nt, synthetic construct
  source 1..21: mol_type = other RNA
tgggacatgacctggttgcta

SEQ ID NO: 682 - RNA, 21 nt, synthetic construct
  source 1..21: mol_type = other RNA
gacatgacctggttgcttcaa

SEQ ID NO: 683 - RNA, 21 nt, synthetic construct
  source 1..21: mol_type = other RNA
acatgacctggttgcttcaca

SEQ ID NO: 684 - RNA, 21 nt, synthetic construct
  source 1..21: mol_type = other RNA
tgacctggttgcttcacagca

SEQ ID NO: 685 - RNA, 21 nt, synthetic construct
  source 1..21: mol_type = other RNA
gacctggttgcttcacagcta

SEQ ID NO: 686 - RNA, 21 nt, synthetic construct
  source 1..21: mol_type = other RNA
acctggttgcttcacagctca

SEQ ID NO: 687 - RNA, 21 nt, synthetic construct
  source 1..21: mol_type = other RNA
cctggttgcttcacagctcca

SEQ ID NO: 688 - RNA, 21 nt, synthetic construct
  source 1..21: mol_type = other RNA
ctggttgcttcacagctccga

SEQ ID NO: 689 - RNA, 21 nt, synthetic construct
  source 1..21: mol_type = other RNA
tggttgcttcacagctccgaa

SEQ ID NO: 690 - RNA, 21 nt, synthetic construct
  source 1..21: mol_type = other RNA
ggttgcttcacagctccgaga

SEQ ID NO: 691 - RNA, 21 nt, synthetic construct
  source 1..21: mol_type = other RNA
gttgcttcacagctccgagaa

SEQ ID NO: 692 - RNA, 21 nt, synthetic construct
  source 1..21: mol_type = other RNA
ttgcttcacagctccgagata

SEQ ID NO: 693 - RNA, 21 nt, synthetic construct
  source 1..21: mol_type = other RNA
cagctccgagatgacacagaa

SEQ ID NO: 694 - RNA, 21 nt, synthetic construct
  source 1..21: mol_type = other RNA
gctccgagatgacacagacta

SEQ ID NO: 695 - RNA, 21 nt, synthetic construct
  source 1..21: mol_type = other RNA
ctccgagatgacacagactta

SEQ ID NO: 696 - RNA, 21 nt, synthetic construct
  source 1..21: mol_type = other RNA
tccgagatgacacagacttga

SEQ ID NO: 697 - RNA, 21 nt, synthetic construct
  source 1..21: mol_type = other RNA
ccgagatgacacagacttgca

SEQ ID NO: 698 - RNA, 21 nt, synthetic construct
  source 1..21: mol_type = other RNA
cgagatgacacagacttgcta

SEQ ID NO: 699 - RNA, 21 nt, synthetic construct
  source 1..21: mol_type = other RNA
gagatgacacagacttgctta

SEQ ID NO: 700 - RNA, 21 nt, synthetic construct
  source 1..21: mol_type = other RNA
gatgacacagacttgcttaaa

SEQ ID NO: 701 - RNA, 21 nt, synthetic construct
  source 1..21: mol_type = other RNA
atgacacagacttgcttaaaa

SEQ ID NO: 702 - RNA, 21 nt, synthetic construct
  source 1..21: mol_type = other RNA
tgacacagacttgcttaaaga

SEQ ID NO: 703 - RNA, 21 nt, synthetic construct
  source 1..21: mol_type = other RNA
gacacagacttgcttaaagga

SEQ ID NO: 704 - RNA, 21 nt, synthetic construct
  source 1..21: mol_type = other RNA
acacagacttgcttaaaggaa

SEQ ID NO: 705 - RNA, 21 nt, synthetic construct
  source 1..21: mol_type = other RNA
cagacttgcttaaaggaagta

SEQ ID NO: 706 - RNA, 21 nt, synthetic construct
  source 1..21: mol_type = other RNA
agacttgcttaaaggaagtga

SEQ ID NO: 707 - RNA, 23 nt, synthetic construct
  source 1..23: mol_type = other RNA
tagcgggacaccgtaggttacgt

SEQ ID NO: 708 - RNA, 23 nt, synthetic construct
  source 1..23: mol_type = other RNA
tcctctctttcctagcgggacac

SEQ ID NO: 709 - RNA, 23 nt, synthetic construct
  source 1..23: mol_type = other RNA
tcacctctctttcctagcgggac

SEQ ID NO: 710 - RNA, 23 nt, synthetic construct
  source 1..23: mol_type = other RNA
tcgcacctctctttcctagcggg

SEQ ID NO: 711 - RNA, 23 nt, synthetic construct
  source 1..23: mol_type = other RNA
tacgcacctctctttcctagcgg

SEQ ID NO: 712 - RNA, 23 nt, synthetic construct
  source 1..23: mol_type = other RNA
ttgacgcacctctctttcctagc

SEQ ID NO: 713 - RNA, 23 nt, synthetic construct
  source 1..23: mol_type = other RNA
ttgtcgctgtttgacgcacctct

SEQ ID NO: 714 - RNA, 23 nt, synthetic construct
  source 1..23: mol_type = other RNA
tttgtcgctgtttgacgcacctc

SEQ ID NO: 715 - RNA, 23 nt, synthetic construct
  source 1..23: mol_type = other RNA
tcttgtcgctgtttgacgcacct

SEQ ID NO: 716 - RNA, 23 nt, synthetic construct
  source 1..23: mol_type = other RNA
  modified_base 7: mod_base = OTHER; note = 5'-methyluridine-3'-phosphate
tacttgtcgctgtttgacgcacc

SEQ ID NO: 717 - RNA, 23 nt, synthetic construct
  source 1..23: mol_type = other RNA
taacttgtcgctgtttgacgcac

SEQ ID NO: 718 - RNA, 23 nt, synthetic construct
  source 1..23: mol_type = other RNA
  modified_base 7: mod_base = OTHER; note = 5'-methyluridine-3'-phosphate
tgaacttgtcgctgtttgacgca

SEQ ID NO: 719 - RNA, 23 nt, synthetic construct
  source 1..23: mol_type = other RNA
  modified_base 7: mod_base = OTHER; note = 5'-methyluridine-3'-phosphate
tggaacttgtcgctgtttgacgc

SEQ ID NO: 720 - RNA, 23 nt, synthetic construct
  source 1..23: mol_type = other RNA
tcggaacttgtcgctgtttgacg

SEQ ID NO: 721 - RNA, 23 nt, synthetic construct
  source 1..23: mol_type = other RNA
tgtcatcttttacgtgggcggaa

SEQ ID NO: 722 - RNA, 23 nt, synthetic construct
  source 1..23: mol_type = other RNA
taagcgtcatcttttacgtgggc

SEQ ID NO: 723 - RNA, 23 nt, synthetic construct
  source 1..23: mol_type = other RNA
  modified_base 7: mod_base = OTHER; note = 5'-methyluridine-3'-phosphate
taagcgtcatcttttacgtgggc

SEQ ID NO: 724 - RNA, 23 nt, synthetic construct
  source 1..23: mol_type = other RNA
tcaagcgtcatcttttacgtggg

SEQ ID NO: 725 - RNA, 23 nt, synthetic construct
  source 1..23: mol_type = other RNA
tccaagcgtcatcttttacgtgg

SEQ ID NO: 726 - RNA, 23 nt, synthetic construct
  source 1..23: mol_type = other RNA
taccaagcgtcatcttttacgtg

SEQ ID NO: 727 - RNA, 23 nt, synthetic construct
  source 1..23: mol_type = other RNA
tcaccaagcgtcatcttttacgt

SEQ ID NO: 728 - RNA, 23 nt, synthetic construct
  source 1..23: mol_type = other RNA
tacaccaagcgtcatcttttacg

SEQ ID NO: 729 - RNA, 23 nt, synthetic construct
  source 1..23: mol_type = other RNA
tcacaccaagcgtcatcttttac

SEQ ID NO: 730 - RNA, 23 nt, synthetic construct
  source 1..23: mol_type = other RNA
tacacaccaagcgtcatctttta

SEQ ID NO: 731 - RNA, 23 nt, synthetic construct
  source 1..23: mol_type = other RNA
ttgacacaccaagcgtcatcttt

SEQ ID NO: 732 - RNA, 23 nt, synthetic construct
  source 1..23: mol_type = other RNA
tgctgacacaccaagcgtcatct

SEQ ID NO: 733 - RNA, 23 nt, synthetic construct
  source 1..23: mol_type = other RNA
tcggctgacacaccaagcgtcat

SEQ ID NO: 734 - RNA, 23 nt, synthetic construct
  source 1..23: mol_type = other RNA
taagagaagcaaccgggcagcag

SEQ ID NO: 735 - RNA, 23 nt, synthetic construct
  source 1..23: mol_type = other RNA
tcacacctgctcttgctagaccc

SEQ ID NO: 736 - RNA, 23 nt, synthetic construct
  source 1..23: mol_type = other RNA
tcctcctaaacccacacctgctc

SEQ ID NO: 737 - RNA, 23 nt, synthetic construct
  source 1..23: mol_type = other RNA
tacctcctaaacccacacctgct

SEQ ID NO: 738 - RNA, 23 nt, synthetic construct
  source 1..23: mol_type = other RNA
tcacctcctaaacccacacctgc

SEQ ID NO: 739 - RNA, 23 nt, synthetic construct
  source 1..23: mol_type = other RNA
tcacacctcctaaacccacacct

SEQ ID NO: 740 - RNA, 23 nt, synthetic construct
  source 1..23: mol_type = other RNA
tcctcagcgagtactgtgagagc

SEQ ID NO: 741 - RNA, 23 nt, synthetic construct
  source 1..23: mol_type = other RNA
taccctcagcgagtactgtgaga

SEQ ID NO: 742 - RNA, 23 nt, synthetic construct
  source 1..23: mol_type = other RNA
tttttcttgttcaccctcagcga

SEQ ID NO: 743 - RNA, 23 nt, synthetic construct
  source 1..23: mol_type = other RNA
ttctttatcaggtcttttcttgt

SEQ ID NO: 744 - RNA, 23 nt, synthetic construct
  source 1..23: mol_type = other RNA
tatctttatcaggtcttttcttg

SEQ ID NO: 745 - RNA, 23 nt, synthetic construct
  source 1..23: mol_type = other RNA
tttaatctttatcaggtcttttc

SEQ ID NO: 746 - RNA, 23 nt, synthetic construct
  source 1..23: mol_type = other RNA
tgttaatctttatcaggtctttt

SEQ ID NO: 747 - RNA, 23 nt, synthetic construct
  source 1..23: mol_type = other RNA
ttggttaatctttatcaggtctt

SEQ ID NO: 748 - RNA, 23 nt, synthetic construct
  source 1..23: mol_type = other RNA
tttttcttctggttaatctttat

SEQ ID NO: 749 - RNA, 23 nt, synthetic construct
  source 1..23: mol_type = other RNA
tcttgttttcttctggttaatct

SEQ ID NO: 750 - RNA, 23 nt, synthetic construct
  source 1..23: mol_type = other RNA
tctccttgttttcttctggttaa

SEQ ID NO: 751 - RNA, 23 nt, synthetic construct
  source 1..23: mol_type = other RNA
tggctgcggttgtttccctcctt

SEQ ID NO: 752 - RNA, 23 nt, synthetic construct
  source 1..23: mol_type = other RNA
taggctgcggttgtttccctcct

SEQ ID NO: 753 - RNA, 23 nt, synthetic construct
  source 1..23: mol_type = other RNA
  modified_base 7: mod_base = OTHER; note = 5'-methyluridine-3'-phosphate
tgcgactcctgagttccagagct

SEQ ID NO: 754 - RNA, 23 nt, synthetic construct
  source 1..23: mol_type = other RNA
ttgcgtcgagctctgaggagagc

SEQ ID NO: 755 - RNA, 23 nt, synthetic construct
  source 1..23: mol_type = other RNA
taatgcgtcgagctctgaggaga

SEQ ID NO: 756 - RNA, 23 nt, synthetic construct
  source 1..23: mol_type = other RNA
tagagaaatgagagggaaagtaa

SEQ ID NO: 757 - RNA, 23 nt, synthetic construct
  source 1..23: mol_type = other RNA
tcagagaaatgagagggaaagta

SEQ ID NO: 758 - RNA, 23 nt, synthetic construct
  source 1..23: mol_type = other RNA
ttcagagaaatgagagggaaagt

SEQ ID NO: 759 - RNA, 23 nt, synthetic construct
  source 1..23: mol_type = other RNA
tggtcagagaaatgagagggaaa

SEQ ID NO: 760 - RNA, 23 nt, synthetic construct
  source 1..23: mol_type = other RNA
ttcggtcagagaaatgagaggga

SEQ ID NO: 761 - RNA, 23 nt, synthetic construct
  source 1..23: mol_type = other RNA
tcttcggtcagagaaatgagagg

SEQ ID NO: 762 - RNA, 23 nt, synthetic construct
  source 1..23: mol_type = other RNA
tgcttcggtcagagaaatgagag

SEQ ID NO: 763 - RNA, 23 nt, synthetic construct
  source 1..23: mol_type = other RNA
tagcttcggtcagagaaatgaga

SEQ ID NO: 764 - RNA, 23 nt, synthetic construct
  source 1..23: mol_type = other RNA
tacacccagcttcggtcagagaa

SEQ ID NO: 765 - RNA, 23 nt, synthetic construct
  source 1..23: mol_type = other RNA
tagaggcgaaagcccgacaccca

SEQ ID NO: 766 - RNA, 23 nt, synthetic construct
  source 1..23: mol_type = other RNA
tcgctagaggcgaaagcccgaca

SEQ ID NO: 767 - RNA, 23 nt, synthetic construct
  source 1..23: mol_type = other RNA
tccagtcgctagaggcgaaagcc

SEQ ID NO: 768 - RNA, 23 nt, synthetic construct
  source 1..23: mol_type = other RNA
tcaccagtcgctagaggcgaaag

SEQ ID NO: 769 - RNA, 23 nt, synthetic construct
  source 1..23: mol_type = other RNA
ttccaccagtcgctagaggcgaa

SEQ ID NO: 770 - RNA, 23 nt, synthetic construct
  source 1..23: mol_type = other RNA
tttccaccagtcgctagaggcga

SEQ ID NO: 771 - RNA, 23 nt, synthetic construct
  source 1..23: mol_type = other RNA
taattccaccagtcgctagaggc

SEQ ID NO: 772 - RNA, 23 nt, synthetic construct
  source 1..23: mol_type = other RNA
tcaattccaccagtcgctagagg

SEQ ID NO: 773 - RNA, 23 nt, synthetic construct
  source 1..23: mol_type = other RNA
ttgcaggcaattccaccagtcgc

SEQ ID NO: 774 - RNA, 23 nt, synthetic construct
  source 1..23: mol_type = other RNA
tatgcaggcaattccaccagtcg

SEQ ID NO: 775 - RNA, 23 nt, synthetic construct
  source 1..23: mol_type = other RNA
tggatgcaggcaattccaccagt

SEQ ID NO: 776 - RNA, 23 nt, synthetic construct
  source 1..23: mol_type = other RNA
taaagcaaggaagaggccagatc

SEQ ID NO: 777 - RNA, 23 nt, synthetic construct
  source 1..23: mol_type = other RNA
tgaaagcaaggaagaggccagat

SEQ ID NO: 778 - RNA, 23 nt, synthetic construct
  source 1..23: mol_type = other RNA
tggaaagcaaggaagaggccaga

SEQ ID NO: 779 - RNA, 23 nt, synthetic construct
  source 1..23: mol_type = other RNA
tgggaaagcaaggaagaggccag

SEQ ID NO: 780 - RNA, 23 nt, synthetic construct
  source 1..23: mol_type = other RNA
tcgggaaagcaaggaagaggcca

SEQ ID NO: 781 - RNA, 23 nt, synthetic construct
  source 1..23: mol_type = other RNA
tgagggcgggaaagcaaggaaga

SEQ ID NO: 782 - RNA, 23 nt, synthetic construct
  source 1..23: mol_type = other RNA
ttgagggcgggaaagcaaggaag

SEQ ID NO: 783 - RNA, 23 nt, synthetic construct
  source 1..23: mol_type = other RNA
tctgagggcgggaaagcaaggaa

SEQ ID NO: 784 - RNA, 23 nt, synthetic construct
  source 1..23: mol_type = other RNA
tactgagggcgggaaagcaagga

SEQ ID NO: 785 - RNA, 23 nt, synthetic construct
  source 1..23: mol_type = other RNA
taaggagacagctcgggtactga

SEQ ID NO: 786 - RNA, 23 nt, synthetic construct
  source 1..23: mol_type = other RNA
tggaaggagacagctcgggtact

SEQ ID NO: 787 - RNA, 23 nt, synthetic construct
  source 1..23: mol_type = other RNA
ttcatcccgcatgatctcctcgc

SEQ ID NO: 788 - RNA, 23 nt, synthetic construct
  source 1..23: mol_type = other RNA
tctgaaattgtgcaggcgtctcc

SEQ ID NO: 789 - RNA, 23 nt, synthetic construct
  source 1..23: mol_type = other RNA
tgctgaaattgtgcaggcgtctc

SEQ ID NO: 790 - RNA, 23 nt, synthetic construct
  source 1..23: mol_type = other RNA
tgggctgaaattgtgcaggcgtc

SEQ ID NO: 791 - RNA, 23 nt, synthetic construct
  source 1..23: mol_type = other RNA
tttgggctgaaattgtgcaggcg

SEQ ID NO: 792 - RNA, 23 nt, synthetic construct
  source 1..23: mol_type = other RNA
tcttgggctgaaattgtgcaggc

SEQ ID NO: 793 - RNA, 23 nt, synthetic construct
  source 1..23: mol_type = other RNA
tgcttgggctgaaattgtgcagg

SEQ ID NO: 794 - RNA, 23 nt, synthetic construct
  source 1..23: mol_type = other RNA
tagaagcttgggctgaaattgtg

SEQ ID NO: 795 - RNA, 23 nt, synthetic construct
  source 1..23: mol_type = other RNA
ttagaagcttgggctgaaattgt

SEQ ID NO: 796 - RNA, 23 nt, synthetic construct
  source 1..23: mol_type = other RNA
  modified_base 7: mod_base = OTHER; note = 5'-methyluridine-3'-phosphate
tctctctagaagcttgggctgaa

SEQ ID NO: 797 - RNA, 23 nt, synthetic construct
  source 1..23: mol_type = other RNA
tactctctagaagcttgggctga

SEQ ID NO: 798 - RNA, 23 nt, synthetic construct
  source 1..23: mol_type = other RNA
  modified_base 7: mod_base = OTHER; note = 5'-methyluridine-3'-phosphate
tcactctctagaagcttgggctg

SEQ ID NO: 799 - RNA, 23 nt, synthetic construct
  source 1..23: mol_type = other RNA
tccactctctagaagcttgggct

SEQ ID NO: 800 - RNA, 23 nt, synthetic construct
  source 1..23: mol_type = other RNA
  modified_base 7: mod_base = OTHER; note = 5'-methyluridine-3'-phosphate
taccactctctagaagcttgggc

SEQ ID NO: 801 - RNA, 23 nt, synthetic construct
  source 1..23: mol_type = other RNA
tcaccactctctagaagcttggg

SEQ ID NO: 802 - RNA, 23 nt, synthetic construct
  source 1..23: mol_type = other RNA
ttcaccactctctagaagcttgg

SEQ ID NO: 803 - RNA, 23 nt, synthetic construct
  source 1..23: mol_type = other RNA
tatcaccactctctagaagcttg

SEQ ID NO: 804 - RNA, 23 nt, synthetic construct
  source 1..23: mol_type = other RNA
tcatcaccactctctagaagctt

SEQ ID NO: 805 - RNA, 23 nt, synthetic construct
  source 1..23: mol_type = other RNA
tgtcatcaccactctctagaagc

SEQ ID NO: 806 - RNA, 23 nt, synthetic construct
  source 1..23: mol_type = other RNA
tcaagtcatcaccactctctaga

SEQ ID NO: 807 - RNA, 23 nt, synthetic construct
  source 1..23: mol_type = other RNA
  modified_base 7: mod_base = OTHER; note = 5'-methyluridine-3'-phosphate
tgcaagtcatcaccactctctag

SEQ ID NO: 808 - RNA, 23 nt, synthetic construct
  source 1..23: mol_type = other RNA
ttgcaagtcatcaccactctcta

SEQ ID NO: 809 - RNA, 23 nt, synthetic construct
  source 1..23: mol_type = other RNA
tatatgcaagtcatcaccactct

SEQ ID NO: 810 - RNA, 23 nt, synthetic construct
  source 1..23: mol_type = other RNA
tctcatatgcaagtcatcaccac

SEQ ID NO: 811 - RNA, 23 nt, synthetic construct
  source 1..23: mol_type = other RNA
tcctcatatgcaagtcatcacca

SEQ ID NO: 812 - RNA, 23 nt, synthetic construct
  source 1..23: mol_type = other RNA
tccctcatatgcaagtcatcacc

SEQ ID NO: 813 - RNA, 23 nt, synthetic construct
  source 1..23: mol_type = other RNA
tccgacttgcattgctgccctca

SEQ ID NO: 814 - RNA, 23 nt, synthetic construct
  source 1..23: mol_type = other RNA
taccgacttgcattgctgccctc

SEQ ID NO: 815 - RNA, 23 nt, synthetic construct
  source 1..23: mol_type = other RNA
tcaccgacttgcattgctgccct

SEQ ID NO: 816 - RNA, 23 nt, synthetic construct
  source 1..23: mol_type = other RNA
tacaccgacttgcattgctgccc

SEQ ID NO: 817 - RNA, 23 nt, synthetic construct
  source 1..23: mol_type = other RNA
tcacaccgacttgcattgctgcc

SEQ ID NO: 818 - RNA, 23 nt, synthetic construct
  source 1..23: mol_type = other RNA
tgagcacaccgacttgcattgct

SEQ ID NO: 819 - RNA, 23 nt, synthetic construct
  source 1..23: mol_type = other RNA
taaccaggtcatgtcccacagaa

SEQ ID NO: 820 - RNA, 23 nt, synthetic construct
  source 1..23: mol_type = other RNA
tcaaccaggtcatgtcccacaga

SEQ ID NO: 821 - RNA, 23 nt, synthetic construct
  source 1..23: mol_type = other RNA
tgcaaccaggtcatgtcccacag

SEQ ID NO: 822 - RNA, 23 nt, synthetic construct
  source 1..23: mol_type = other RNA
tagcaaccaggtcatgtcccaca

SEQ ID NO: 823 - RNA, 23 nt, synthetic construct
  source 1..23: mol_type = other RNA
ttgaagcaaccaggtcatgtccc

SEQ ID NO: 824 - RNA, 23 nt, synthetic construct
  source 1..23: mol_type = other RNA
tgtgaagcaaccaggtcatgtcc

SEQ ID NO: 825 - RNA, 23 nt, synthetic construct
  source 1..23: mol_type = other RNA
tgctgtgaagcaaccaggtcatg

SEQ ID NO: 826 - RNA, 23 nt, synthetic construct
  source 1..23: mol_type = other RNA
  modified_base 7: mod_base = OTHER; note = 5'-methyluridine-3'-phosphate
tagctgtgaagcaaccaggtcat

SEQ ID NO: 827 - RNA, 23 nt, synthetic construct
  source 1..23: mol_type = other RNA
tgagctgtgaagcaaccaggtca

SEQ ID NO: 828 - RNA, 23 nt, synthetic construct
  source 1..23: mol_type = other RNA
  modified_base 7: mod_base = OTHER; note = 5'-methyluridine-3'-phosphate
tggagctgtgaagcaaccaggtc

SEQ ID NO: 829 - RNA, 23 nt, synthetic construct
  source 1..23: mol_type = other RNA
tcggagctgtgaagcaaccaggt

SEQ ID NO: 830 - RNA, 23 nt, synthetic construct
  source 1..23: mol_type = other RNA
ttcggagctgtgaagcaaccagg

SEQ ID NO: 831 - RNA, 23 nt, synthetic construct
  source 1..23: mol_type = other RNA
tctcggagctgtgaagcaaccag

SEQ ID NO: 832 - RNA, 23 nt, synthetic construct
  source 1..23: mol_type = other RNA
ttctcggagctgtgaagcaacca

SEQ ID NO: 833 - RNA, 23 nt, synthetic construct
  source 1..23: mol_type = other RNA
tatctcggagctgtgaagcaacc

SEQ ID NO: 834 - RNA, 23 nt, synthetic construct
  source 1..23: mol_type = other RNA
ttctgtgtcatctcggagctgtg

SEQ ID NO: 835 - RNA, 23 nt, synthetic construct
  source 1..23: mol_type = other RNA
tagtctgtgtcatctcggagctg

SEQ ID NO: 836 - RNA, 23 nt, synthetic construct
  source 1..23: mol_type = other RNA
  modified_base 7: mod_base = OTHER; note = 5'-methyluridine-3'-phosphate
taagtctgtgtcatctcggagct

SEQ ID NO: 837 - RNA, 23 nt, synthetic construct
  source 1..23: mol_type = other RNA
tcaagtctgtgtcatctcggagc

SEQ ID NO: 838 - RNA, 23 nt, synthetic construct
  source 1..23: mol_type = other RNA
  modified_base 7: mod_base = OTHER; note = 5'-methyluridine-3'-phosphate
tgcaagtctgtgtcatctcggag

SEQ ID NO: 839 - RNA, 23 nt, synthetic construct
  source 1..23: mol_type = other RNA
tagcaagtctgtgtcatctcgga

SEQ ID NO: 840 - RNA, 23 nt, synthetic construct
  source 1..23: mol_type = other RNA
taagcaagtctgtgtcatctcgg

SEQ ID NO: 841 - RNA, 23 nt, synthetic construct
  source 1..23: mol_type = other RNA
tttaagcaagtctgtgtcatctc

SEQ ID NO: 842 - RNA, 23 nt, synthetic construct
  source 1..23: mol_type = other RNA
ttttaagcaagtctgtgtcatct

SEQ ID NO: 843 - RNA, 23 nt, synthetic construct
  source 1..23: mol_type = other RNA
tctttaagcaagtctgtgtcatc

SEQ ID NO: 844 - RNA, 23 nt, synthetic construct
  source 1..23: mol_type = other RNA
tcctttaagcaagtctgtgtcat

SEQ ID NO: 845 - RNA, 23 nt, synthetic construct
  source 1..23: mol_type = other RNA
ttcctttaagcaagtctgtgtca

SEQ ID NO: 846 - RNA, 23 nt, synthetic construct
  source 1..23: mol_type = other RNA
tacttcctttaagcaagtctgtg

SEQ ID NO: 847 - RNA, 23 nt, synthetic construct
  source 1..23: mol_type = other RNA
tcacttcctttaagcaagtctgt

SEQ ID NO: 848 - RNA, 21 nt, synthetic construct
  source 1..21: mol_type = other RNA
  modified_base 1: mod_base = OTHER; note = 2'-O-methylguanosine-3'-phosphorothioate
  modified_base 2: mod_base = OTHER; note = 2'-O-methyluridine-3'-phosphorothioate
  modified_base 3: mod_base = OTHER; note = 2'-O-methyladenosine-3'-phosphate
  modified_base 4: mod_base = OTHER; note = 2'-O-methyladenosine-3'-phosphate
  modified_base 5: mod_base = OTHER; note = 2'-O-methylcytidine-3'-phosphate
  modified_base 6: mod_base = OTHER; note = 2'-O-hexadecyl-cytidine-3'-phosphate
  modified_base 7: mod_base = OTHER; note = 2'-deoxy-2'-fluorouridine-3'-phosphate
  modified_base 8: mod_base = OTHER; note = 2'-O-methyladenosine-3'-phosphate
  modified_base 9: mod_base = OTHER; note = 2'-deoxy-2'-fluorocytidine-3'-phosphate
  modified_base 10: mod_base = OTHER; note = 2'-deoxy-2'-fluoroguanosine-3'-phosphate
  modified_base 11: mod_base = OTHER; note = 2'-deoxy-2'-fluoroguanosine-3'-phosphate
  modified_base 12: mod_base = OTHER; note = 2'-O-methyluridine-3'-phosphate
  modified_base 13: mod_base = OTHER; note = 2'-O-methylguanosine-3'-phosphate
  modified_base 14: mod_base = OTHER; note = 2'-O-methyluridine-3'-phosphate
  modified_base 15: mod_base = OTHER; note = 2'-O-methylcytidine-3'-phosphate
  modified_base 16: mod_base = OTHER; note = 2'-O-methylcytidine-3'-phosphate
  modified_base 17: mod_base = OTHER; note = 2'-O-methylcytidine-3'-phosphate
  modified_base 18: mod_base = OTHER; note = 2'-O-methylguanosine-3'-phosphate
  modified_base 19: mod_base = OTHER; note = 2'-O-methylcytidine-3'-phosphorothioate
  modified_base 20: mod_base = OTHER; note = 2'-O-methyluridine-3'-phosphorothioate
  modified_base 21: mod_base = OTHER; note = 2'-O-methyladenosine
gtaacctacggtgtcccgcta

SEQ ID NO: 849 - RNA, 21 nt, synthetic construct
  source 1..21: mol_type = other RNA
  modified_base 1: mod_base = OTHER; note = 2'-O-methylguanosine-3'-phosphorothioate
  modified_base 2: mod_base = OTHER; note = 2'-O-methyluridine-3'-phosphorothioate
  modified_base 3: mod_base = OTHER; note = 2'-O-methylcytidine-3'-phosphate
  modified_base 4: mod_base = OTHER; note = 2'-O-methylcytidine-3'-phosphate
  modified_base 5: mod_base = OTHER; note = 2'-O-methylcytidine-3'-phosphate
  modified_base 6: mod_base = OTHER; note = 2'-O-hexadecyl-guanosine-3'-phosphate
  modified_base 7: mod_base = OTHER; note = 2'-deoxy-2'-fluorocytidine-3'-phosphate
  modified_base 8: mod_base = OTHER; note = 2'-O-methyluridine-3'-phosphate
  modified_base 9: mod_base = OTHER; note = 2'-deoxy-2'-fluoroadenosine-3'-phosphate
  modified_base 10: mod_base = OTHER; note = 2'-deoxy-2'-fluoroguanosine-3'-phosphate
  modified_base 11: mod_base = OTHER; note = 2'-deoxy-2'-fluoroguanosine-3'-phosphate
  modified_base 12: mod_base = OTHER; note = 2'-O-methyladenosine-3'-phosphate
  modified_base 13: mod_base = OTHER; note = 2'-O-methyladenosine-3'-phosphate
  modified_base 14: mod_base = OTHER; note = 2'-O-methyladenosine-3'-phosphate
  modified_base 15: mod_base = OTHER; note = 2'-O-methylguanosine-3'-phosphate
  modified_base 16: mod_base = OTHER; note = 2'-O-methyladenosine-3'-phosphate
  modified_base 17: mod_base = OTHER; note = 2'-O-methylguanosine-3'-phosphate
  modified_base 18: mod_base = OTHER; note = 2'-O-methyladenosine-3'-phosphate
  modified_base 19: mod_base = OTHER; note = 2'-O-methylguanosine-3'-phosphorothioate
  modified_base 20: mod_base = OTHER; note = 2'-O-methylguanosine-3'-phosphorothioate
  modified_base 21: mod_base = OTHER; note = 2'-O-methyladenosine
gtcccgctaggaaagagagga

SEQ ID NO: 850 - RNA, 21 nt, synthetic construct
  source 1..21: mol_type = other RNA
  modified_base 1: mod_base = OTHER; note = 2'-O-methylcytidine-3'-phosphorothioate
  modified_base 2: mod_base = OTHER; note = 2'-O-methylcytidine-3'-phosphorothioate
  modified_base 3: mod_base = OTHER; note = 2'-O-methylcytidine-3'-phosphate
  modified_base 4: mod_base = OTHER; note = 2'-O-methylguanosine-3'-phosphate
  modified_base 5: mod_base = OTHER; note = 2'-O-methylcytidine-3'-phosphate
  modified_base 6: mod_base = OTHER; note = 2'-O-hexadecyl-uridine-3'-phosphate
  modified_base 7: mod_base = OTHER; note = 2'-deoxy-2'-fluoroadenosine-3'-phosphate
  modified_base 8: mod_base = OTHER; note = 2'-O-methylguanosine-3'-phosphate
  modified_base 9: mod_base = OTHER; note = 2'-deoxy-2'-fluoroguanosine-3'-phosphate
  modified_base 10: mod_base = OTHER; note = 2'-deoxy-2'-fluoroadenosine-3'-phosphate
  modified_base 11: mod_base = OTHER; note = 2'-deoxy-2'-fluoroadenosine-3'-phosphate
  modified_base 12: mod_base = OTHER; note = 2'-O-methyladenosine-3'-phosphate
  modified_base 13: mod_base = OTHER; note = 2'-O-methylguanosine-3'-phosphate
  modified_base 14: mod_base = OTHER; note = 2'-O-methyladenosine-3'-phosphate
  modified_base 15: mod_base = OTHER; note = 2'-O-methylguanosine-3'-phosphate
  modified_base 16: mod_base = OTHER; note = 2'-O-methyladenosine-3'-phosphate
  modified_base 17: mod_base = OTHER; note = 2'-O-methylguanosine-3'-phosphate
  modified_base 18: mod_base = OTHER; note = 2'-O-methylguanosine-3'-phosphate
  modified_base 19: mod_base = OTHER; note = 2'-O-methyluridine-3'-phosphorothioate
  modified_base 20: mod_base = OTHER; note = 2'-O-methylguanosine-3'-phosphorothioate
  modified_base 21: mod_base = OTHER; note = 2'-O-methyladenosine
cccgctaggaaagagaggtga

SEQ ID NO: 851 - RNA, 21 nt, synthetic construct
  source 1..21: mol_type = other RNA
  modified_base 1: mod_base = OTHER; note = 2'-O-methylcytidine-3'-phosphorothioate
  modified_base 2: mod_base = OTHER; note = 2'-O-methylguanosine-3'-phosphorothioate
  modified_base 3: mod_base = OTHER; note = 2'-O-methylcytidine-3'-phosphate
  modified_base 4: mod_base = OTHER; note = 2'-O-methyluridine-3'-phosphate
  modified_base 5: mod_base = OTHER; note = 2'-O-methyladenosine-3'-phosphate
  modified_base 6: mod_base = OTHER; note = 2'-O-hexadecyl-guanosine-3'-phosphate
  modified_base 7: mod_base = OTHER; note = 2'-deoxy-2'-fluoroguanosine-3'-phosphate
  modified_base 8: mod_base = OTHER; note = 2'-O-methyladenosine-3'-phosphate
  modified_base 9: mod_base = OTHER; note = 2'-deoxy-2'-fluoroadenosine-3'-phosphate
  modified_base 10: mod_base = OTHER; note = 2'-deoxy-2'-fluoroadenosine-3'-phosphate
  modified_base 11: mod_base = OTHER; note = 2'-deoxy-2'-fluoroguanosine-3'-phosphate
  modified_base 12: mod_base = OTHER; note = 2'-O-methyladenosine-3'-phosphate
  modified_base 13: mod_base = OTHER; note = 2'-O-methylguanosine-3'-phosphate
  modified_base 14: mod_base = OTHER; note = 2'-O-methyladenosine-3'-phosphate
  modified_base 15: mod_base = OTHER; note = 2'-O-methylguanosine-3'-phosphate
  modified_base 16: mod_base = OTHER; note = 2'-O-methylguanosine-3'-phosphate
  modified_base 17: mod_base = OTHER; note = 2'-O-methyluridine-3'-phosphate
  modified_base 18: mod_base = OTHER; note = 2'-O-methylguanosine-3'-phosphate
  modified_base 19: mod_base = OTHER; note = 2'-O-methylcytidine-3'-phosphorothioate
  modified_base 20: mod_base = OTHER; note = 2'-O-methylguanosine-3'-phosphorothioate
  modified_base 21: mod_base = OTHER; note = 2'-O-methyladenosine
cgctaggaaagagaggtgcga

SEQ ID NO: 852 - RNA, 21 nt, synthetic construct
  source 1..21: mol_type = other RNA
  modified_base 1: mod_base = OTHER; note = 2'-O-methylguanosine-3'-phosphorothioate
  modified_base 2: mod_base = OTHER; note = 2'-O-methylcytidine-3'-phosphorothioate
  modified_base 3: mod_base = OTHER; note = 2'-O-methyluridine-3'-phosphate
  modified_base 4: mod_base = OTHER; note = 2'-O-methyladenosine-3'-phosphate
  modified_base 5: mod_base = OTHER; note = 2'-O-methylguanosine-3'-phosphate
  modified_base 6: mod_base = OTHER; note = 2'-O-hexadecyl-guanosine-3'-phosphate
  modified_base 7: mod_base = OTHER; note = 2'-deoxy-2'-fluoroadenosine-3'-phosphate
  modified_base 8: mod_base = OTHER; note = 2'-O-methyladenosine-3'-phosphate
  modified_base 9: mod_base = OTHER; note = 2'-deoxy-2'-fluoroadenosine-3'-phosphate
  modified_base 10: mod_base = OTHER; note = 2'-deoxy-2'-fluoroguanosine-3'-phosphate
  modified_base 11: mod_base = OTHER; note = 2'-deoxy-2'-fluoroadenosine-3'-phosphate
  modified_base 12: mod_base = OTHER; note = 2'-O-methylguanosine-3'-phosphate
  modified_base 13: mod_base = OTHER; note = 2'-O-methyladenosine-3'-phosphate
  modified_base 14: mod_base = OTHER; note = 2'-O-methylguanosine-3'-phosphate
  modified_base 15: mod_base = OTHER; note = 2'-O-methylguanosine-3'-phosphate
  modified_base 16: mod_base = OTHER; note = 2'-O-methyluridine-3'-phosphate
  modified_base 17: mod_base = OTHER; note = 2'-O-methylguanosine-3'-phosphate
  modified_base 18: mod_base = OTHER; note = 2'-O-methylcytidine-3'-phosphate
  modified_base 19: mod_base = OTHER; note = 2'-O-methylguanosine-3'-phosphorothioate
  modified_base 20: mod_base = OTHER; note = 2'-O-methyluridine-3'-phosphorothioate
  modified_base 21: mod_base = OTHER; note = 2'-O-methyladenosine
gctaggaaagagaggtgcgta

SEQ ID NO: 853 - RNA, 21 nt, synthetic construct
  source 1..21: mol_type = other RNA
  modified_base 1: mod_base = OTHER; note = 2'-O-methyluridine-3'-phosphorothioate
  modified_base 2: mod_base = OTHER; note = 2'-O-methyladenosine-3'-phosphorothioate
  modified_base 3: mod_base = OTHER; note = 2'-O-methylguanosine-3'-phosphate
  modified_base 4: mod_base = OTHER; note = 2'-O-methylguanosine-3'-phosphate
  modified_base 5: mod_base = OTHER; note = 2'-O-methyladenosine-3'-phosphate
  modified_base 6: mod_base = OTHER; note = 2'-O-hexadecyl-adenosine-3'-phosphate
  modified_base 7: mod_base = OTHER; note = 2'-deoxy-2'-fluoroadenosine-3'-phosphate
  modified_base 8: mod_base = OTHER; note = 2'-O-methylguanosine-3'-phosphate
  modified_base 9: mod_base = OTHER; note = 2'-deoxy-2'-fluoroadenosine-3'-phosphate
  modified_base 10: mod_base = OTHER; note = 2'-deoxy-2'-fluoroguanosine-3'-phosphate
  modified_base 11: mod_base = OTHER; note = 2'-deoxy-2'-fluoroadenosine-3'-phosphate
  modified_base 12: mod_base = OTHER; note = 2'-O-methylguanosine-3'-phosphate
  modified_base 13: mod_base = OTHER; note = 2'-O-methylguanosine-3'-phosphate
  modified_base 14: mod_base = OTHER; note = 2'-O-methyluridine-3'-phosphate
  modified_base 15: mod_base = OTHER; note = 2'-O-methylguanosine-3'-phosphate
  modified_base 16: mod_base = OTHER; note = 2'-O-methylcytidine-3'-phosphate
  modified_base 17: mod_base = OTHER; note = 2'-O-methylguanosine-3'-phosphate
  modified_base 18: mod_base = OTHER; note = 2'-O-methyluridine-3'-phosphate
  modified_base 19: mod_base = OTHER; note = 2'-O-methylcytidine-3'-phosphorothioate
  modified_base 20: mod_base = OTHER; note = 2'-O-methyladenosine-3'-phosphorothioate
  modified_base 21: mod_base = OTHER; note = 2'-O-methyladenosine
taggaaagagaggtgcgtcaa

SEQ ID NO: 854 - RNA, 21 nt, synthetic construct
  source 1..21: mol_type = other RNA
  modified_base 1: mod_base = OTHER; note = 2'-O-methyladenosine-3'-phosphorothioate
  modified_base 2: mod_base = OTHER; note = 2'-O-methylguanosine-3'-phosphorothioate
  modified_base 3: mod_base = OTHER; note = 2'-O-methylguanosine-3'-phosphate
  modified_base 4: mod_base = OTHER; note = 2'-O-methyluridine-3'-phosphate
  modified_base 5: mod_base = OTHER; note = 2'-O-methylguanosine-3'-phosphate
  modified_base 6: mod_base = OTHER; note = 2'-O-hexadecyl-cytidine-3'-phosphate
  modified_base 7: mod_base = OTHER; note = 2'-deoxy-2'-fluoroguanosine-3'-phosphate
  modified_base 8: mod_base = OTHER; note = 2'-O-methyluridine-3'-phosphate
  modified_base 9: mod_base = OTHER; note = 2'-deoxy-2'-fluorocytidine-3'-phosphate
  modified_base 10: mod_base = OTHER; note = 2'-deoxy-2'-fluoroadenosine-3'-phosphate
  modified_base 11: mod_base = OTHER; note = 2'-deoxy-2'-fluoroadenosine-3'-phosphate
  modified_base 12: mod_base = OTHER; note = 2'-O-methyladenosine-3'-phosphate
  modified_base 13: mod_base = OTHER; note = 2'-O-methylcytidine-3'-phosphate
  modified_base 14: mod_base = OTHER; note = 2'-O-methyladenosine-3'-phosphate
  modified_base 15: mod_base = OTHER; note = 2'-O-methylguanosine-3'-phosphate
  modified_base 16: mod_base = OTHER; note = 2'-O-methylcytidine-3'-phosphate
  modified_base 17: mod_base = OTHER; note = 2'-O-methylguanosine-3'-phosphate
  modified_base 18: mod_base = OTHER; note = 2'-O-methyladenosine-3'-phosphate
  modified_base 19: mod_base = OTHER; note = 2'-O-methylcytidine-3'-phosphorothioate
  modified_base 20: mod_base = OTHER; note = 2'-O-methyladenosine-3'-phosphorothioate
  modified_base 21: mod_base = OTHER; note = 2'-O-methyladenosine
aggtgcgtcaaacagcgacaa

SEQ ID NO: 855 - RNA, 21 nt, synthetic construct
  source 1..21: mol_type = other RNA
  modified_base 1: mod_base = OTHER; note = 2'-O-methylguanosine-3'-phosphorothioate
  modified_base 2: mod_base = OTHER; note = 2'-O-methylguanosine-3'-phosphorothioate
  modified_base 3: mod_base = OTHER; note = 2'-O-methyluridine-3'-phosphate
  modified_base 4: mod_base = OTHER; note = 2'-O-methylguanosine-3'-phosphate
  modified_base 5: mod_base = OTHER; note = 2'-O-methylcytidine-3'-phosphate
  modified_base 6: mod_base = OTHER; note = 2'-O-hexadecyl-guanosine-3'-phosphate
  modified_base 7: mod_base = OTHER; note = 2'-deoxy-2'-fluorouridine-3'-phosphate
  modified_base 8: mod_base = OTHER; note = 2'-O-methylcytidine-3'-phosphate
  modified_base 9: mod_base = OTHER; note = 2'-deoxy-2'-fluoroadenosine-3'-phosphate
  modified_base 10: mod_base = OTHER; note = 2'-deoxy-2'-fluoroadenosine-3'-phosphate
  modified_base 11: mod_base = OTHER; note = 2'-deoxy-2'-fluoroadenosine-3'-phosphate
  modified_base 12: mod_base = OTHER; note = 2'-O-methylcytidine-3'-phosphate
  modified_base 13: mod_base = OTHER; note = 2'-O-methyladenosine-3'-phosphate
  modified_base 14: mod_base = OTHER; note = 2'-O-methylguanosine-3'-phosphate
  modified_base 15: mod_base = OTHER; note = 2'-O-methylcytidine-3'-phosphate
  modified_base 16: mod_base = OTHER; note = 2'-O-methylguanosine-3'-phosphate
  modified_base 17: mod_base = OTHER; note = 2'-O-methyladenosine-3'-phosphate
  modified_base 18: mod_base = OTHER; note = 2'-O-methylcytidine-3'-phosphate
  modified_base 19: mod_base = OTHER; note = 2'-O-methyladenosine-3'-phosphorothioate
  modified_base 20: mod_base = OTHER; note = 2'-O-methyladenosine-3'-phosphorothioate
  modified_base 21: mod_base = OTHER; note = 2'-O-methyladenosine
ggtgcgtcaaacagcgacaaa

SEQ ID NO: 856 - RNA, 21 nt, synthetic construct
  source 1..21: mol_type = other RNA
  modified_base 1: mod_base = OTHER; note = 2'-O-methylguanosine-3'-phosphorothioate
  modified_base 2: mod_base = OTHER; note = 2'-O-methyluridine-3'-phosphorothioate
  modified_base 3: mod_base = OTHER; note = 2'-O-methylguanosine-3'-phosphate
  modified_base 4: mod_base = OTHER; note = 2'-O-methylcytidine-3'-phosphate
  modified_base 5: mod_base = OTHER; note = 2'-O-methylguanosine-3'-phosphate
  modified_base 6: mod_base = OTHER; note = 2'-O-hexadecyl-uridine-3'-phosphate
  modified_base 7: mod_base = OTHER; note = 2'-deoxy-2'-fluorocytidine-3'-phosphate
  modified_base 8: mod_base = OTHER; note = 2'-O-methyladenosine-3'-phosphate
  modified_base 9: mod_base = OTHER; note = 2'-deoxy-2'-fluoroadenosine-3'-phosphate
  modified_base 10: mod_base = OTHER; note = 2'-deoxy-2'-fluoroadenosine-3'-phosphate
  modified_base 11: mod_base = OTHER; note = 2'-deoxy-2'-fluorocytidine-3'-phosphate
  modified_base 12: mod_base = OTHER; note = 2'-O-methyladenosine-3'-phosphate
  modified_base 13: mod_base = OTHER; note = 2'-O-methylguanosine-3'-phosphate
  modified_base 14: mod_base = OTHER; note = 2'-O-methylcytidine-3'-phosphate
  modified_base 15: mod_base = OTHER; note = 2'-O-methylguanosine-3'-phosphate
  modified_base 16: mod_base = OTHER; note = 2'-O-methyladenosine-3'-phosphate
  modified_base 17: mod_base = OTHER; note = 2'-O-methylcytidine-3'-phosphate
  modified_base 18: mod_base = OTHER; note = 2'-O-methyladenosine-3'-phosphate
  modified_base 19: mod_base = OTHER; note = 2'-O-methyladenosine-3'-phosphorothioate
  modified_base 20: mod_base = OTHER; note = 2'-O-methylguanosine-3'-phosphorothioate
  modified_base 21: mod_base = OTHER; note = 2'-O-methyladenosine
gtgcgtcaaacagcgacaaga

SEQ ID NO: 857 - RNA, 21 nt, synthetic construct
  source 1..21: mol_type = other RNA
  modified_base 1: mod_base = OTHER; note = 2'-O-methyluridine-3'-phosphorothioate
  modified_base 2: mod_base = OTHER; note = 2'-O-methylguanosine-3'-phosphorothioate
  modified_base 3: mod_base = OTHER; note = 2'-O-methylcytidine-3'-phosphate
  modified_base 4: mod_base = OTHER; note = 2'-O-methylguanosine-3'-phosphate
  modified_base 5: mod_base = OTHER; note = 2'-O-methyluridine-3'-phosphate
  modified_base 6: mod_base = OTHER; note = 2'-O-hexadecyl-cytidine-3'-phosphate
  modified_base 7: mod_base = OTHER; note = 2'-deoxy-2'-fluoroadenosine-3'-phosphate
  modified_base 8: mod_base = OTHER; note = 2'-O-methyladenosine-3'-phosphate
  modified_base 9: mod_base = OTHER; note = 2'-deoxy-2'-fluoroadenosine-3'-phosphate
  modified_base 10: mod_base = OTHER; note = 2'-deoxy-2'-fluorocytidine-3'-phosphate
  modified_base 11: mod_base = OTHER; note = 2'-deoxy-2'-fluoroadenosine-3'-phosphate
  modified_base 12: mod_base = OTHER; note = 2'-O-methylguanosine-3'-phosphate
  modified_base 13: mod_base = OTHER; note = 2'-O-methylcytidine-3'-phosphate
  modified_base 14: mod_base = OTHER; note = 2'-O-methylguanosine-3'-phosphate
  modified_base 15: mod_base = OTHER; note = 2'-O-methyladenosine-3'-phosphate
  modified_base 16: mod_base = OTHER; note = 2'-O-methylcytidine-3'-phosphate
  modified_base 17: mod_base = OTHER; note = 2'-O-methyladenosine-3'-phosphate
  modified_base 18: mod_base = OTHER; note = 2'-O-methyladenosine-3'-phosphate
  modified_base 19: mod_base = OTHER; note = 2'-O-methylguanosine-3'-phosphorothioate
  modified_base 20: mod_base = OTHER; note = 2'-O-methyluridine-3'-phosphorothioate
  modified_base 21: mod_base = OTHER; note = 2'-O-methyladenosine
tgcgtcaaacagcgacaagta

SEQ ID NO: 858 - RNA, 21 nt, synthetic construct
  source 1..21: mol_type = other RNA
  modified_base 1: mod_base = OTHER; note = 2'-O-methylguanosine-3'-phosphorothioate
  modified_base 2: mod_base = OTHER; note = 2'-O-methylcytidine-3'-phosphorothioate
  modified_base 3: mod_base = OTHER; note = 2'-O-methylguanosine-3'-phosphate
  modified_base 4: mod_base = OTHER; note = 2'-O-methyluridine-3'-phosphate
  modified_base 5: mod_base = OTHER; note = 2'-O-methylcytidine-3'-phosphate
  modified_base 6: mod_base = OTHER; note = 2'-O-hexadecyl-adenosine-3'-phosphate
  modified_base 7: mod_base = OTHER; note = 2'-deoxy-2'-fluoroadenosine-3'-phosphate
  modified_base 8: mod_base = OTHER; note = 2'-O-methyladenosine-3'-phosphate
  modified_base 9: mod_base = OTHER; note = 2'-deoxy-2'-fluorocytidine-3'-phosphate
  modified_base 10: mod_base = OTHER; note = 2'-deoxy-2'-fluoroadenosine-3'-phosphate
  modified_base 11: mod_base = OTHER; note = 2'-deoxy-2'-fluoroguanosine-3'-phosphate
  modified_base 12: mod_base = OTHER; note = 2'-O-methylcytidine-3'-phosphate
  modified_base 13: mod_base = OTHER; note = 2'-O-methylguanosine-3'-phosphate
  modified_base 14: mod_base = OTHER; note = 2'-O-methyladenosine-3'-phosphate
  modified_base 15: mod_base = OTHER; note = 2'-O-methylcytidine-3'-phosphate
  modified_base 16: mod_base = OTHER; note = 2'-O-methyladenosine-3'-phosphate
  modified_base 17: mod_base = OTHER; note = 2'-O-methyladenosine-3'-phosphate
  modified_base 18: mod_base = OTHER; note = 2'-O-methylguanosine-3'-phosphate
  modified_base 19: mod_base = OTHER; note = 2'-O-methyluridine-3'-phosphorothioate
  modified_base 20: mod_base = OTHER; note = 2'-O-methyluridine-3'-phosphorothioate
  modified_base 21: mod_base = OTHER; note = 2'-O-methyladenosine
gcgtcaaacagcgacaagtta

SEQ ID NO: 859 - RNA, 21 nt, synthetic construct
  source 1..21: mol_type = other RNA
  modified_base 1: mod_base = OTHER; note = 2'-O-methylcytidine-3'-phosphorothioate
  modified_base 2: mod_base = OTHER; note = 2'-O-methylguanosine-3'-phosphorothioate
  modified_base 3: mod_base = OTHER; note = 2'-O-methyluridine-3'-phosphate
  modified_base 4: mod_base = OTHER; note = 2'-O-methylcytidine-3'-phosphate
  modified_base 5: mod_base = OTHER; note = 2'-O-methyladenosine-3'-phosphate
  modified_base 6: mod_base = OTHER; note = 2'-O-hexadecyl-adenosine-3'-phosphate
  modified_base 7: mod_base = OTHER; note = 2'-deoxy-2'-fluoroadenosine-3'-phosphate
  modified_base 8: mod_base = OTHER; note = 2'-O-methylcytidine-3'-phosphate
  modified_base 9: mod_base = OTHER; note = 2'-deoxy-2'-fluoroadenosine-3'-phosphate
  modified_base 10: mod_base = OTHER; note = 2'-deoxy-2'-fluoroguanosine-3'-phosphate
  modified_base 11: mod_base = OTHER; note = 2'-deoxy-2'-fluorocytidine-3'-phosphate
  modified_base 12: mod_base = OTHER; note = 2'-O-methylguanosine-3'-phosphate
  modified_base 13: mod_base = OTHER; note = 2'-O-methyladenosine-3'-phosphate
  modified_base 14: mod_base = OTHER; note = 2'-O-methylcytidine-3'-phosphate
  modified_base 15: mod_base = OTHER; note = 2'-O-methyladenosine-3'-phosphate
  modified_base 16: mod_base = OTHER; note = 2'-O-methyladenosine-3'-phosphate
  modified_base 17: mod_base = OTHER; note = 2'-O-methylguanosine-3'-phosphate
  modified_base 18: mod_base = OTHER; note = 2'-O-methyluridine-3'-phosphate
  modified_base 19: mod_base = OTHER; note = 2'-O-methyluridine-3'-phosphorothioate
  modified_base 20: mod_base = OTHER; note = 2'-O-methylcytidine-3'-phosphorothioate
  modified_base 21: mod_base = OTHER; note = 2'-O-methyladenosine
cgtcaaacagcgacaagttca

SEQ ID NO: 860 - RNA, 21 nt, synthetic construct
  source 1..21: mol_type = other RNA
  modified_base 1: mod_base = OTHER; note = 2'-O-methylguanosine-3'-phosphorothioate
  modified_base 2: mod_base = OTHER; note = 2'-O-methyluridine-3'-phosphorothioate
  modified_base 3: mod_base = OTHER; note = 2'-O-methylcytidine-3'-phosphate
  modified_base 4: mod_base = OTHER; note = 2'-O-methyladenosine-3'-phosphate
  modified_base 5: mod_base = OTHER; note = 2'-O-methyladenosine-3'-phosphate
  modified_base 6: mod_base = OTHER; note = 2'-O-hexadecyl-adenosine-3'-phosphate
  modified_base 7: mod_base = OTHER; note = 2'-deoxy-2'-fluorocytidine-3'-phosphate
  modified_base 8: mod_base = OTHER; note = 2'-O-methyladenosine-3'-phosphate
  modified_base 9: mod_base = OTHER; note = 2'-deoxy-2'-fluoroguanosine-3'-phosphate
  modified_base 10: mod_base = OTHER; note = 2'-deoxy-2'-fluorocytidine-3'-phosphate
  modified_base 11: mod_base = OTHER; note = 2'-deoxy-2'-fluoroguanosine-3'-phosphate
  modified_base 12: mod_base = OTHER; note = 2'-O-methyladenosine-3'-phosphate
  modified_base 13: mod_base = OTHER; note = 2'-O-methylcytidine-3'-phosphate
  modified_base 14: mod_base = OTHER; note = 2'-O-methyladenosine-3'-phosphate
  modified_base 15: mod_base = OTHER; note = 2'-O-methyladenosine-3'-phosphate
  modified_base 16: mod_base = OTHER; note = 2'-O-methylguanosine-3'-phosphate
  modified_base 17: mod_base = OTHER; note = 2'-O-methyluridine-3'-phosphate
  modified_base 18: mod_base = OTHER; note = 2'-O-methyluridine-3'-phosphate
  modified_base 19: mod_base = OTHER; note = 2'-O-methylcytidine-3'-phosphorothioate
  modified_base 20: mod_base = OTHER; note = 2'-O-methylcytidine-3'-phosphorothioate
  modified_base 21: mod_base = OTHER; note = 2'-O-methyladenosine
gtcaaacagcgacaagttcca

SEQ ID NO: 861 - RNA, 21 nt, synthetic construct
  source 1..21: mol_type = other RNA
  modified_base 1: mod_base = OTHER; note = 2'-O-methyluridine-3'-phosphorothioate
  modified_base 2: mod_base = OTHER; note = 2'-O-methylcytidine-3'-phosphorothioate
  modified_base 3: mod_base = OTHER; note = 2'-O-methyladenosine-3'-phosphate
  modified_base 4: mod_base = OTHER; note = 2'-O-methyladenosine-3'-phosphate
  modified_base 5: mod_base = OTHER; note = 2'-O-methyladenosine-3'-phosphate
  modified_base 6: mod_base = OTHER; note = 2'-O-hexadecyl-cytidine-3'-phosphate
  modified_base 7: mod_base = OTHER; note = 2'-deoxy-2'-fluoroadenosine-3'-phosphate
  modified_base 8: mod_base = OTHER; note = 2'-O-methylguanosine-3'-phosphate
  modified_base 9: mod_base = OTHER; note = 2'-deoxy-2'-fluorocytidine-3'-phosphate
  modified_base 10: mod_base = OTHER; note = 2'-deoxy-2'-fluoroguanosine-3'-phosphate
  modified_base 11: mod_base = OTHER; note = 2'-deoxy-2'-fluoroadenosine-3'-phosphate
  modified_base 12: mod_base = OTHER; note = 2'-O-methylcytidine-3'-phosphate
  modified_base 13: mod_base = OTHER; note = 2'-O-methyladenosine-3'-phosphate
  modified_base 14: mod_base = OTHER; note = 2'-O-methyladenosine-3'-phosphate
  modified_base 15: mod_base = OTHER; note = 2'-O-methylguanosine-3'-phosphate
  modified_base 16: mod_base = OTHER; note = 2'-O-methyluridine-3'-phosphate
  modified_base 17: mod_base = OTHER; note = 2'-O-methyluridine-3'-phosphate
  modified_base 18: mod_base = OTHER; note = 2'-O-methylcytidine-3'-phosphate
  modified_base 19: mod_base = OTHER; note = 2'-O-methylcytidine-3'-phosphorothioate
  modified_base 20: mod_base = OTHER; note = 2'-O-methylguanosine-3'-phosphorothioate
  modified_base 21: mod_base = OTHER; note = 2'-O-methyladenosine
tcaaacagcgacaagttccga

SEQ ID NO: 862 - RNA, 21 nt, synthetic construct
  source 1..21: mol_type = other RNA
  modified_base 1: mod_base = OTHER; note = 2'-O-methylcytidine-3'-phosphorothioate
  modified_base 2: mod_base = OTHER; note = 2'-O-methylcytidine-3'-phosphorothioate
  modified_base 3: mod_base = OTHER; note = 2'-O-methylguanosine-3'-phosphate
  modified_base 4: mod_base = OTHER; note = 2'-O-methylcytidine-3'-phosphate
  modified_base 5: mod_base = OTHER; note = 2'-O-methylcytidine-3'-phosphate
  modified_base 6: mod_base = OTHER; note = 2'-O-hexadecyl-cytidine-3'-phosphate
  modified_base 7: mod_base = OTHER; note = 2'-deoxy-2'-fluoroadenosine-3'-phosphate
  modified_base 8: mod_base = OTHER; note = 2'-O-methylcytidine-3'-phosphate
  modified_base 9: mod_base = OTHER; note = 2'-deoxy-2'-fluoroguanosine-3'-phosphate
  modified_base 10: mod_base = OTHER; note = 2'-deoxy-2'-fluorouridine-3'-phosphate
  modified_base 11: mod_base = OTHER; note = 2'-deoxy-2'-fluoroadenosine-3'-phosphate
  modified_base 12: mod_base = OTHER; note = 2'-O-methyladenosine-3'-phosphate
  modified_base 13: mod_base = OTHER; note = 2'-O-methyladenosine-3'-phosphate
  modified_base 14: mod_base = OTHER; note = 2'-O-methyladenosine-3'-phosphate
  modified_base 15: mod_base = OTHER; note = 2'-O-methylguanosine-3'-phosphate
  modified_base 16: mod_base = OTHER; note = 2'-O-methyladenosine-3'-phosphate
  modified_base 17: mod_base = OTHER; note = 2'-O-methyluridine-3'-phosphate
  modified_base 18: mod_base = OTHER; note = 2'-O-methylguanosine-3'-phosphate
  modified_base 19: mod_base = OTHER; note = 2'-O-methyladenosine-3'-phosphorothioate
  modified_base 20: mod_base = OTHER; note = 2'-O-methylcytidine-3'-phosphorothioate
  modified_base 21: mod_base = OTHER; note = 2'-O-methyladenosine
ccgcccacgtaaaagatgaca

SEQ ID NO: 863 - RNA, 21 nt, synthetic construct
  source 1..21: mol_type = other RNA
  modified_base 1: mod_base = OTHER; note = 2'-O-methylcytidine-3'-phosphorothioate
  modified_base 2: mod_base = OTHER; note = 2'-O-methylcytidine-3'-phosphorothioate
  modified_base 3: mod_base = OTHER; note = 2'-O-methyladenosine-3'-phosphate
  modified_base 4: mod_base = OTHER; note = 2'-O-methylcytidine-3'-phosphate
  modified_base 5: mod_base = OTHER; note = 2'-O-methylguanosine-3'-phosphate
  modified_base 6: mod_base = OTHER; note = 2'-O-hexadecyl-uridine-3'-phosphate
  modified_base 7: mod_base = OTHER; note = 2'-deoxy-2'-fluoroadenosine-3'-phosphate
  modified_base 8: mod_base = OTHER; note = 2'-O-methyladenosine-3'-phosphate
  modified_base 9: mod_base = OTHER; note = 2'-deoxy-2'-fluoroadenosine-3'-phosphate
  modified_base 10: mod_base = OTHER; note = 2'-deoxy-2'-fluoroadenosine-3'-phosphate
  modified_base 11: mod_base = OTHER; note = 2'-deoxy-2'-fluoroguanosine-3'-phosphate
  modified_base 12: mod_base = OTHER; note = 2'-O-methyladenosine-3'-phosphate
  modified_base 13: mod_base = OTHER; note = 2'-O-methyluridine-3'-phosphate
  modified_base 14: mod_base = OTHER; note = 2'-O-methylguanosine-3'-phosphate
  modified_base 15: mod_base = OTHER; note = 2'-O-methyladenosine-3'-phosphate
  modified_base 16: mod_base = OTHER; note = 2'-O-methylcytidine-3'-phosphate
  modified_base 17: mod_base = OTHER; note = 2'-O-methylguanosine-3'-phosphate
  modified_base 18: mod_base = OTHER; note = 2'-O-methylcytidine-3'-phosphate
  modified_base 19: mod_base = OTHER; note = 2'-O-methyluridine-3'-phosphorothioate
  modified_base 20: mod_base = OTHER; note = 2'-O-methyluridine-3'-phosphorothioate
  modified_base 21: mod_base = OTHER; note = 2'-O-methyladenosine
ccacgtaaaagatgacgctta

SEQ ID NO: 864 - RNA, 21 nt, synthetic construct
  source 1..21: mol_type = other RNA
  modified_base 1: mod_base = OTHER; note = 2'-O-methylcytidine-3'-phosphorothioate
  modified_base 2: mod_base = OTHER; note = 2'-O-methyladenosine-3'-phosphorothioate
  modified_base 3: mod_base = OTHER; note = 2'-O-methylcytidine-3'-phosphate
  modified_base 4: mod_base = OTHER; note = 2'-O-methylguanosine-3'-phosphate
  modified_base 5: mod_base = OTHER; note = 2'-O-methyluridine-3'-phosphate
  modified_base 6: mod_base = OTHER; note = 2'-O-hexadecyl-adenosine-3'-phosphate
  modified_base 7: mod_base = OTHER; note = 2'-deoxy-2'-fluoroadenosine-3'-phosphate
  modified_base 8: mod_base = OTHER; note = 2'-O-methyladenosine-3'-phosphate
  modified_base 9: mod_base = OTHER; note = 2'-deoxy-2'-fluoroadenosine-3'-phosphate
  modified_base 10: mod_base = OTHER; note = 2'-deoxy-2'-fluoroguanosine-3'-phosphate
  modified_base 11: mod_base = OTHER; note = 2'-deoxy-2'-fluoroadenosine-3'-phosphate
  modified_base 12: mod_base = OTHER; note = 2'-O-methyluridine-3'-phosphate
  modified_base 13: mod_base = OTHER; note = 2'-O-methylguanosine-3'-phosphate
  modified_base 14: mod_base = OTHER; note = 2'-O-methyladenosine-3'-phosphate
  modified_base 15: mod_base = OTHER; note = 2'-O-methylcytidine-3'-phosphate
  modified_base 16: mod_base = OTHER; note = 2'-O-methylguanosine-3'-phosphate
  modified_base 17: mod_base = OTHER; note = 2'-O-methylcytidine-3'-phosphate
  modified_base 18: mod_base = OTHER; note = 2'-O-methyluridine-3'-phosphate
  modified_base 19: mod_base = OTHER; note = 2'-O-methyluridine-3'-phosphorothioate
  modified_base 20: mod_base = OTHER; note = 2'-O-methylguanosine-3'-phosphorothioate
  modified_base 21: mod_base = OTHER; note = 2'-O-methyladenosine
cacgtaaaagatgacgcttga

SEQ ID NO: 865 - RNA, 21 nt, synthetic construct
  source 1..21: mol_type = other RNA
  modified_base 1: mod_base = OTHER; note = 2'-O-methyladenosine-3'-phosphorothioate
  modified_base 2: mod_base = OTHER; note = 2'-O-methylcytidine-3'-phosphorothioate
  modified_base 3: mod_base = OTHER; note = 2'-O-methylguanosine-3'-phosphate
  modified_base 4: mod_base = OTHER; note = 2'-O-methyluridine-3'-phosphate
  modified_base 5: mod_base = OTHER; note = 2'-O-methyladenosine-3'-phosphate
  modified_base 6: mod_base = OTHER; note = 2'-O-hexadecyl-adenosine-3'-phosphate
  modified_base 7: mod_base = OTHER; note = 2'-deoxy-2'-fluoroadenosine-3'-phosphate
  modified_base 8: mod_base = OTHER; note = 2'-O-methyladenosine-3'-phosphate
  modified_base 9: mod_base = OTHER; note = 2'-deoxy-2'-fluoroguanosine-3'-phosphate
  modified_base 10: mod_base = OTHER; note = 2'-deoxy-2'-fluoroadenosine-3'-phosphate
  modified_base 11: mod_base = OTHER; note = 2'-deoxy-2'-fluorouridine-3'-phosphate
  modified_base 12: mod_base = OTHER; note = 2'-O-methylguanosine-3'-phosphate
  modified_base 13: mod_base = OTHER; note = 2'-O-methyladenosine-3'-phosphate
  modified_base 14: mod_base = OTHER; note = 2'-O-methylcytidine-3'-phosphate
  modified_base 15: mod_base = OTHER; note = 2'-O-methylguanosine-3'-phosphate
  modified_base 16: mod_base = OTHER; note = 2'-O-methylcytidine-3'-phosphate
  modified_base 17: mod_base = OTHER; note = 2'-O-methyluridine-3'-phosphate
  modified_base 18: mod_base = OTHER; note = 2'-O-methyluridine-3'-phosphate
  modified_base 19: mod_base = OTHER; note = 2'-O-methylguanosine-3'-phosphorothioate
  modified_base 20: mod_base = OTHER; note = 2'-O-methylguanosine-3'-phosphorothioate
  modified_base 21: mod_base = OTHER; note = 2'-O-methyladenosine
acgtaaaagatgacgcttgga

SEQ ID NO: 866 - RNA, 21 nt, synthetic construct
  source 1..21: mol_type = other RNA
  modified_base 1: mod_base = OTHER; note = 2'-O-methylcytidine-3'-phosphorothioate
  modified_base 2: mod_base = OTHER; note = 2'-O-methylguanosine-3'-phosphorothioate
  modified_base 3: mod_base = OTHER; note = 2'-O-methyluridine-3'-phosphate
  modified_base 4: mod_base = OTHER; note = 2'-O-methyladenosine-3'-phosphate
  modified_base 5: mod_base = OTHER; note = 2'-O-methyladenosine-3'-phosphate
  modified_base 6: mod_base = OTHER; note = 2'-O-hexadecyl-adenosine-3'-phosphate
  modified_base 7: mod_base = OTHER; note = 2'-deoxy-2'-fluoroadenosine-3'-phosphate
  modified_base 8: mod_base = OTHER; note = 2'-O-methylguanosine-3'-phosphate
  modified_base 9: mod_base = OTHER; note = 2'-deoxy-2'-fluoroadenosine-3'-phosphate
  modified_base 10: mod_base = OTHER; note = 2'-deoxy-2'-fluorouridine-3'-phosphate
  modified_base 11: mod_base = OTHER; note = 2'-deoxy-2'-fluoroguanosine-3'-phosphate
  modified_base 12: mod_base = OTHER; note = 2'-O-methyladenosine-3'-phosphate
  modified_base 13: mod_base = OTHER; note = 2'-O-methylcytidine-3'-phosphate
  modified_base 14: mod_base = OTHER; note = 2'-O-methylguanosine-3'-phosphate
  modified_base 15: mod_base = OTHER; note = 2'-O-methylcytidine-3'-phosphate
  modified_base 16: mod_base = OTHER; note = 2'-O-methyluridine-3'-phosphate
  modified_base 17: mod_base = OTHER; note = 2'-O-methyluridine-3'-phosphate
  modified_base 18: mod_base = OTHER; note = 2'-O-methylguanosine-3'-phosphate
  modified_base 19: mod_base = OTHER; note = 2'-O-methylguanosine-3'-phosphorothioate
  modified_base 20: mod_base = OTHER; note = 2'-O-methyluridine-3'-phosphorothioate
  modified_base 21: mod_base = OTHER; note = 2'-O-methyladenosine
cgtaaaagatgacgcttggta

SEQ ID NO: 867 - RNA, 21 nt, synthetic construct
  source 1..21: mol_type = other RNA
  modified_base 1: mod_base = OTHER; note = 2'-O-methylguanosine-3'-phosphorothioate
  modified_base 2: mod_base = OTHER; note = 2'-O-methyluridine-3'-phosphorothioate
  modified_base 3: mod_base = OTHER; note = 2'-O-methyladenosine-3'-phosphate
  modified_base 4: mod_base = OTHER; note = 2'-O-methyladenosine-3'-phosphate
  modified_base 5: mod_base = OTHER; note = 2'-O-methyladenosine-3'-phosphate
  modified_base 6: mod_base = OTHER; note = 2'-O-hexadecyl-adenosine-3'-phosphate
  modified_base 7: mod_base = OTHER; note = 2'-deoxy-2'-fluoroguanosine-3'-phosphate
  modified_base 8: mod_base = OTHER; note = 2'-O-methyladenosine-3'-phosphate
  modified_base 9: mod_base = OTHER; note = 2'-deoxy-2'-fluorouridine-3'-phosphate
  modified_base 10: mod_base = OTHER; note = 2'-deoxy-2'-fluoroguanosine-3'-phosphate
  modified_base 11: mod_base = OTHER; note = 2'-deoxy-2'-fluoroadenosine-3'-phosphate
  modified_base 12: mod_base = OTHER; note = 2'-O-methylcytidine-3'-phosphate
  modified_base 13: mod_base = OTHER; note = 2'-O-methylguanosine-3'-phosphate
  modified_base 14: mod_base = OTHER; note = 2'-O-methylcytidine-3'-phosphate
  modified_base 15: mod_base = OTHER; note = 2'-O-methyluridine-3'-phosphate
  modified_base 16: mod_base = OTHER; note = 2'-O-methyluridine-3'-phosphate
  modified_base 17: mod_base = OTHER; note = 2'-O-methylguanosine-3'-phosphate
  modified_base 18: mod_base = OTHER; note = 2'-O-methylguanosine-3'-phosphate
  modified_base 19: mod_base = OTHER; note = 2'-O-methyluridine-3'-phosphorothioate
  modified_base 20: mod_base = OTHER; note = 2'-O-methylguanosine-3'-phosphorothioate
  modified_base 21: mod_base = OTHER; note = 2'-O-methyladenosine
gtaaaagatgacgcttggtga

SEQ ID NO: 868 - RNA, 21 nt, synthetic construct
  source 1..21: mol_type = other RNA
  modified_base 1: mod_base = OTHER; note = 2'-O-methyluridine-3'-phosphorothioate
  modified_base 2: mod_base = OTHER; note = 2'-O-methyladenosine-3'-phosphorothioate
  modified_base 3: mod_base = OTHER; note = 2'-O-methyladenosine-3'-phosphate
  modified_base 4: mod_base = OTHER; note = 2'-O-methyladenosine-3'-phosphate
  modified_base 5: mod_base = OTHER; note = 2'-O-methyladenosine-3'-phosphate
  modified_base 6: mod_base = OTHER; note = 2'-O-hexadecyl-guanosine-3'-phosphate
  modified_base 7: mod_base = OTHER; note = 2'-deoxy-2'-fluoroadenosine-3'-phosphate
  modified_base 8: mod_base = OTHER; note = 2'-O-methyluridine-3'-phosphate
  modified_base 9: mod_base = OTHER; note = 2'-deoxy-2'-fluoroguanosine-3'-phosphate
  modified_base 10: mod_base = OTHER; note = 2'-deoxy-2'-fluoroadenosine-3'-phosphate
  modified_base 11: mod_base = OTHER; note = 2'-deoxy-2'-fluorocytidine-3'-phosphate
  modified_base 12: mod_base = OTHER; note = 2'-O-methylguanosine-3'-phosphate
  modified_base 13: mod_base = OTHER; note = 2'-O-methylcytidine-3'-phosphate
  modified_base 14: mod_base = OTHER; note = 2'-O-methyluridine-3'-phosphate
  modified_base 15: mod_base = OTHER; note = 2'-O-methyluridine-3'-phosphate
  modified_base 16: mod_base = OTHER; note = 2'-O-methylguanosine-3'-phosphate
  modified_base 17: mod_base = OTHER; note = 2'-O-methylguanosine-3'-phosphate
  modified_base 18: mod_base = OTHER; note = 2'-O-methyluridine-3'-phosphate
  modified_base 19: mod_base = OTHER; note = 2'-O-methylguanosine-3'-phosphorothioate
  modified_base 20: mod_base = OTHER; note = 2'-O-methyluridine-3'-phosphorothioate
  modified_base 21: mod_base = OTHER; note = 2'-O-methyladenosine
taaaagatgacgcttggtgta

SEQ ID NO: 869 - RNA, 21 nt, synthetic construct
  source 1..21: mol_type = other RNA
  modified_base 1: mod_base = OTHER; note = 2'-O-methyladenosine-3'-phosphorothioate
  modified_base 2: mod_base = OTHER; note = 2'-O-methyladenosine-3'-phosphorothioate
  modified_base 3: mod_base = OTHER; note = 2'-O-methyladenosine-3'-phosphate
  modified_base 4: mod_base = OTHER; note = 2'-O-methyladenosine-3'-phosphate
  modified_base 5: mod_base = OTHER; note = 2'-O-methylguanosine-3'-phosphate
  modified_base 6: mod_base = OTHER; note = 2'-O-hexadecyl-adenosine-3'-phosphate
  modified_base 7: mod_base = OTHER; note = 2'-deoxy-2'-fluorouridine-3'-phosphate
  modified_base 8: mod_base = OTHER; note = 2'-O-methylguanosine-3'-phosphate
  modified_base 9: mod_base = OTHER; note = 2'-deoxy-2'-fluoroadenosine-3'-phosphate
  modified_base 10: mod_base = OTHER; note = 2'-deoxy-2'-fluorocytidine-3'-phosphate
  modified_base 11: mod_base = OTHER; note = 2'-deoxy-2'-fluoroguanosine-3'-phosphate
  modified_base 12: mod_base = OTHER; note = 2'-O-methylcytidine-3'-phosphate
  modified_base 13: mod_base = OTHER; note = 2'-O-methyluridine-3'-phosphate
  modified_base 14: mod_base = OTHER; note = 2'-O-methyluridine-3'-phosphate
  modified_base 15: mod_base = OTHER; note = 2'-O-methylguanosine-3'-phosphate
  modified_base 16: mod_base = OTHER; note = 2'-O-methylguanosine-3'-phosphate
  modified_base 17: mod_base = OTHER; note = 2'-O-methyluridine-3'-phosphate
  modified_base 18: mod_base = OTHER; note = 2'-O-methylguanosine-3'-phosphate
  modified_base 19: mod_base = OTHER; note = 2'-O-methyluridine-3'-phosphorothioate
  modified_base 20: mod_base = OTHER; note = 2'-O-methylguanosine-3'-phosphorothioate
  modified_base 21: mod_base = OTHER; note = 2'-O-methyladenosine
aaaagatgacgcttggtgtga

SEQ ID NO: 870 - RNA, 21 nt, synthetic construct
  source 1..21: mol_type = other RNA
  modified_base 1: mod_base = OTHER; note = 2'-O-methyladenosine-3'-phosphorothioate
  modified_base 2: mod_base = OTHER; note = 2'-O-methyladenosine-3'-phosphorothioate
  modified_base 3: mod_base = OTHER; note = 2'-O-methyladenosine-3'-phosphate
  modified_base 4: mod_base = OTHER; note = 2'-O-methylguanosine-3'-phosphate
  modified_base 5: mod_base = OTHER; note = 2'-O-methyladenosine-3'-phosphate
  modified_base 6: mod_base = OTHER; note = 2'-O-hexadecyl-uridine-3'-phosphate
  modified_base 7: mod_base = OTHER; note = 2'-deoxy-2'-fluoroguanosine-3'-phosphate
  modified_base 8: mod_base = OTHER; note = 2'-O-methyladenosine-3'-phosphate
  modified_base 9: mod_base = OTHER; note = 2'-deoxy-2'-fluorocytidine-3'-phosphate
  modified_base 10: mod_base = OTHER; note = 2'-deoxy-2'-fluoroguanosine-3'-phosphate
  modified_base 11: mod_base = OTHER; note = 2'-deoxy-2'-fluorocytidine-3'-phosphate
  modified_base 12: mod_base = OTHER; note = 2'-O-methyluridine-3'-phosphate
  modified_base 13: mod_base = OTHER; note = 2'-O-methyluridine-3'-phosphate
  modified_base 14: mod_base = OTHER; note = 2'-O-methylguanosine-3'-phosphate
  modified_base 15: mod_base = OTHER; note = 2'-O-methylguanosine-3'-phosphate
  modified_base 16: mod_base = OTHER; note = 2'-O-methyluridine-3'-phosphate
  modified_base 17: mod_base = OTHER; note = 2'-O-methylguanosine-3'-phosphate
  modified_base 18: mod_base = OTHER; note = 2'-O-methyluridine-3'-phosphate
  modified_base 19: mod_base = OTHER; note = 2'-O-methylguanosine-3'-phosphorothioate
  modified_base 20: mod_base = OTHER; note = 2'-O-methyluridine-3'-phosphorothioate
  modified_base 21: mod_base = OTHER; note = 2'-O-methyladenosine
aaagatgacgcttggtgtgta

SEQ ID NO: 871 - RNA, 21 nt, synthetic construct
  source 1..21: mol_type = other RNA
  modified_base 1: mod_base = OTHER; note = 2'-O-methyladenosine-3'-phosphorothioate
  modified_base 2: mod_base = OTHER; note = 2'-O-methylguanosine-3'-phosphorothioate
  modified_base 3: mod_base = OTHER; note = 2'-O-methyladenosine-3'-phosphate
  modified_base 4: mod_base = OTHER; note = 2'-O-methyluridine-3'-phosphate
  modified_base 5: mod_base = OTHER; note = 2'-O-methylguanosine-3'-phosphate
  modified_base 6: mod_base = OTHER; note = 2'-O-hexadecyl-adenosine-3'-phosphate
  modified_base 7: mod_base = OTHER; note = 2'-deoxy-2'-fluorocytidine-3'-phosphate
  modified_base 8: mod_base = OTHER; note = 2'-O-methylguanosine-3'-phosphate
  modified_base 9: mod_base = OTHER; note = 2'-deoxy-2'-fluorocytidine-3'-phosphate
  modified_base 10: mod_base = OTHER; note = 2'-deoxy-2'-fluorouridine-3'-phosphate
  modified_base 11: mod_base = OTHER; note = 2'-deoxy-2'-fluorouridine-3'-phosphate
  modified_base 12: mod_base = OTHER; note = 2'-O-methylguanosine-3'-phosphate
  modified_base 13: mod_base = OTHER; note = 2'-O-methylguanosine-3'-phosphate
  modified_base 14: mod_base = OTHER; note = 2'-O-methyluridine-3'-phosphate
  modified_base 15: mod_base = OTHER; note = 2'-O-methylguanosine-3'-phosphate
  modified_base 16: mod_base = OTHER; note = 2'-O-methyluridine-3'-phosphate
  modified_base 17: mod_base = OTHER; note = 2'-O-methylguanosine-3'-phosphate
  modified_base 18: mod_base = OTHER; note = 2'-O-methyluridine-3'-phosphate
  modified_base 19: mod_base = OTHER; note = 2'-O-methylcytidine-3'-phosphorothioate
  modified_base 20: mod_base = OTHER; note = 2'-O-methyladenosine-3'-phosphorothioate
  modified_base 21: mod_base = OTHER; note = 2'-O-methyladenosine
agatgacgcttggtgtgtcaa

SEQ ID NO: 872 - RNA, 21 nt, synthetic construct
  source 1..21: mol_type = other RNA
  modified_base 1: mod_base = OTHER; note = 2'-O-methyladenosine-3'-phosphorothioate
  modified_base 2: mod_base = OTHER; note = 2'-O-methyluridine-3'-phosphorothioate
  modified_base 3: mod_base = OTHER; note = 2'-O-methylguanosine-3'-phosphate
  modified_base 4: mod_base = OTHER; note = 2'-O-methyladenosine-3'-phosphate
  modified_base 5: mod_base = OTHER; note = 2'-O-methylcytidine-3'-phosphate
  modified_base 6: mod_base = OTHER; note = 2'-O-hexadecyl-guanosine-3'-phosphate
  modified_base 7: mod_base = OTHER; note = 2'-deoxy-2'-fluorocytidine-3'-phosphate
  modified_base 8: mod_base = OTHER; note = 2'-O-methyluridine-3'-phosphate
  modified_base 9: mod_base = OTHER; note = 2'-deoxy-2'-fluorouridine-3'-phosphate
  modified_base 10: mod_base = OTHER; note = 2'-deoxy-2'-fluoroguanosine-3'-phosphate
  modified_base 11: mod_base = OTHER; note = 2'-deoxy-2'-fluoroguanosine-3'-phosphate
  modified_base 12: mod_base = OTHER; note = 2'-O-methyluridine-3'-phosphate
  modified_base 13: mod_base = OTHER; note = 2'-O-methylguanosine-3'-phosphate
  modified_base 14: mod_base = OTHER; note = 2'-O-methyluridine-3'-phosphate
  modified_base 15: mod_base = OTHER; note = 2'-O-methylguanosine-3'-phosphate
  modified_base 16: mod_base = OTHER; note = 2'-O-methyluridine-3'-phosphate
  modified_base 17: mod_base = OTHER; note = 2'-O-methylcytidine-3'-phosphate
  modified_base 18: mod_base = OTHER; note = 2'-O-methyladenosine-3'-phosphate
  modified_base 19: mod_base = OTHER; note = 2'-O-methylguanosine-3'-phosphorothioate
  modified_base 20: mod_base = OTHER; note = 2'-O-methylcytidine-3'-phosphorothioate
  modified_base 21: mod_base = OTHER; note = 2'-O-methyladenosine
atgacgcttggtgtgtcagca

SEQ ID NO: 873 - RNA, 21 nt, synthetic construct
  source 1..21: mol_type = other RNA
  modified_base 1: mod_base = OTHER; note = 2'-O-methylguanosine-3'-phosphorothioate
  modified_base 2: mod_base = OTHER; note = 2'-O-methyladenosine-3'-phosphorothioate
  modified_base 3: mod_base = OTHER; note = 2'-O-methylcytidine-3'-phosphate
  modified_base 4: mod_base = OTHER; note = 2'-O-methylguanosine-3'-phosphate
  modified_base 5: mod_base = OTHER; note = 2'-O-methylcytidine-3'-phosphate
  modified_base 6: mod_base = OTHER; note = 2'-O-hexadecyl-uridine-3'-phosphate
  modified_base 7: mod_base = OTHER; note = 2'-deoxy-2'-fluorouridine-3'-phosphate
  modified_base 8: mod_base = OTHER; note = 2'-O-methylguanosine-3'-phosphate
  modified_base 9: mod_base = OTHER; note = 2'-deoxy-2'-fluoroguanosine-3'-phosphate
  modified_base 10: mod_base = OTHER; note = 2'-deoxy-2'-fluorouridine-3'-phosphate
  modified_base 11: mod_base = OTHER; note = 2'-deoxy-2'-fluoroguanosine-3'-phosphate
  modified_base 12: mod_base = OTHER; note = 2'-O-methyluridine-3'-phosphate
  modified_base 13: mod_base = OTHER; note = 2'-O-methylguanosine-3'-phosphate
  modified_base 14: mod_base = OTHER; note = 2'-O-methyluridine-3'-phosphate
  modified_base 15: mod_base = OTHER; note = 2'-O-methylcytidine-3'-phosphate
  modified_base 16: mod_base = OTHER; note = 2'-O-methyladenosine-3'-phosphate
  modified_base 17: mod_base = OTHER; note = 2'-O-methylguanosine-3'-phosphate
  modified_base 18: mod_base = OTHER; note = 2'-O-methylcytidine-3'-phosphate
  modified_base 19: mod_base = OTHER; note = 2'-O-methylcytidine-3'-phosphorothioate
  modified_base 20: mod_base = OTHER; note = 2'-O-methylguanosine-3'-phosphorothioate
  modified_base 21: mod_base = OTHER; note = 2'-O-methyladenosine
gacgcttggtgtgtcagccga

SEQ ID NO: 874 - RNA, 21 nt, synthetic construct
  source 1..21: mol_type = other RNA
  modified_base 1: mod_base = OTHER; note = 2'-O-methylguanosine-3'-phosphorothioate
  modified_base 2: mod_base = OTHER; note = 2'-O-methylcytidine-3'-phosphorothioate
  modified_base 3: mod_base = OTHER; note = 2'-O-methyluridine-3'-phosphate
  modified_base 4: mod_base = OTHER; note = 2'-O-methylguanosine-3'-phosphate
  modified_base 5: mod_base = OTHER; note = 2'-O-methylcytidine-3'-phosphate
  modified_base 6: mod_base = OTHER; note = 2'-O-hexadecyl-cytidine-3'-phosphate
  modified_base 7: mod_base = OTHER; note = 2'-deoxy-2'-fluorocytidine-3'-phosphate
  modified_base 8: mod_base = OTHER; note = 2'-O-methylguanosine-3'-phosphate
  modified_base 9: mod_base = OTHER; note = 2'-deoxy-2'-fluoroguanosine-3'-phosphate
  modified_base 10: mod_base = OTHER; note = 2'-deoxy-2'-fluorouridine-3'-phosphate
  modified_base 11: mod_base = OTHER; note = 2'-deoxy-2'-fluorouridine-3'-phosphate
  modified_base 12: mod_base = OTHER; note = 2'-O-methylguanosine-3'-phosphate
  modified_base 13: mod_base = OTHER; note = 2'-O-methylcytidine-3'-phosphate
  modified_base 14: mod_base = OTHER; note = 2'-O-methyluridine-3'-phosphate
  modified_base 15: mod_base = OTHER; note = 2'-O-methyluridine-3'-phosphate
  modified_base 16: mod_base = OTHER; note = 2'-O-methylcytidine-3'-phosphate
  modified_base 17: mod_base = OTHER; note = 2'-O-methyluridine-3'-phosphate
  modified_base 18: mod_base = OTHER; note = 2'-O-methylcytidine-3'-phosphate
  modified_base 19: mod_base = OTHER; note = 2'-O-methyluridine-3'-phosphorothioate
  modified_base 20: mod_base = OTHER; note = 2'-O-methyluridine-3'-phosphorothioate
  modified_base 21: mod_base = OTHER; note = 2'-O-methyladenosine
gctgcccggttgcttctctta

SEQ ID NO: 875 - RNA, 21 nt, synthetic construct
  source 1..21: mol_type = other RNA
  modified_base 1: mod_base = OTHER; note = 2'-O-methylguanosine-3'-phosphorothioate
  modified_base 2: mod_base = OTHER; note = 2'-O-methyluridine-3'-phosphorothioate
  modified_base 3: mod_base = OTHER; note = 2'-O-methylcytidine-3'-phosphate
  modified_base 4: mod_base = OTHER; note = 2'-O-methyluridine-3'-phosphate
  modified_base 5: mod_base = OTHER; note = 2'-O-methyladenosine-3'-phosphate
  modified_base 6: mod_base = OTHER; note = 2'-O-hexadecyl-guanosine-3'-phosphate
  modified_base 7: mod_base = OTHER; note = 2'-deoxy-2'-fluorocytidine-3'-phosphate
  modified_base 8: mod_base = OTHER; note = 2'-O-methyladenosine-3'-phosphate
  modified_base 9: mod_base = OTHER; note = 2'-deoxy-2'-fluoroadenosine-3'-phosphate
  modified_base 10: mod_base = OTHER; note = 2'-deoxy-2'-fluoroguanosine-3'-phosphate
  modified_base 11: mod_base = OTHER; note = 2'-deoxy-2'-fluoroadenosine-3'-phosphate
  modified_base 12: mod_base = OTHER; note = 2'-O-methylguanosine-3'-phosphate
  modified_base 13: mod_base = OTHER; note = 2'-O-methylcytidine-3'-phosphate
  modified_base 14: mod_base = OTHER; note = 2'-O-methyladenosine-3'-phosphate
  modified_base 15: mod_base = OTHER; note = 2'-O-methylguanosine-3'-phosphate
  modified_base 16: mod_base = OTHER; note = 2'-O-methylguanosine-3'-phosphate
  modified_base 17: mod_base = OTHER; note = 2'-O-methyluridine-3'-phosphate
  modified_base 18: mod_base = OTHER; note = 2'-O-methylguanosine-3'-phosphate
  modified_base 19: mod_base = OTHER; note = 2'-O-methyluridine-3'-phosphorothioate
  modified_base 20: mod_base = OTHER; note = 2'-O-methylguanosine-3'-phosphorothioate
  modified_base 21: mod_base = OTHER; note = 2'-O-methyladenosine
gtctagcaagagcaggtgtga

SEQ ID NO: 876 - RNA, 21 nt, synthetic construct
  source 1..21: mol_type = other RNA
  modified_base 1: mod_base = OTHER; note = 2'-O-methylguanosine-3'-phosphorothioate
  modified_base 2: mod_base = OTHER; note = 2'-O-methylcytidine-3'-phosphorothioate
  modified_base 3: mod_base = OTHER; note = 2'-O-methyladenosine-3'-phosphate
  modified_base 4: mod_base = OTHER; note = 2'-O-methylguanosine-3'-phosphate
  modified_base 5: mod_base = OTHER; note = 2'-O-methylguanosine-3'-phosphate
  modified_base 6: mod_base = OTHER; note = 2'-O-hexadecyl-uridine-3'-phosphate
  modified_base 7: mod_base = OTHER; note = 2'-deoxy-2'-fluoroguanosine-3'-phosphate
  modified_base 8: mod_base = OTHER; note = 2'-O-methyluridine-3'-phosphate
  modified_base 9: mod_base = OTHER; note = 2'-deoxy-2'-fluoroguanosine-3'-phosphate
  modified_base 10: mod_base = OTHER; note = 2'-deoxy-2'-fluoroguanosine-3'-phosphate
  modified_base 11: mod_base = OTHER; note = 2'-deoxy-2'-fluoroguanosine-3'-phosphate
  modified_base 12: mod_base = OTHER; note = 2'-O-methyluridine-3'-phosphate
  modified_base 13: mod_base = OTHER; note = 2'-O-methyluridine-3'-phosphate
  modified_base 14: mod_base = OTHER; note = 2'-O-methyluridine-3'-phosphate
  modified_base 15: mod_base = OTHER; note = 2'-O-methyladenosine-3'-phosphate
  modified_base 16: mod_base = OTHER; note = 2'-O-methylguanosine-3'-phosphate
  modified_base 17: mod_base = OTHER; note = 2'-O-methylguanosine-3'-phosphate
  modified_base 18: mod_base = OTHER; note = 2'-O-methyladenosine-3'-phosphate
  modified_base 19: mod_base = OTHER; note = 2'-O-methylguanosine-3'-phosphorothioate
  modified_base 20: mod_base = OTHER; note = 2'-O-methylguanosine-3'-phosphorothioate
  modified_base 21: mod_base = OTHER; note = 2'-O-methyladenosine
gcaggtgtgggtttaggagga

SEQ ID NO: 877 - RNA, 21 nt, synthetic construct
  source 1..21: mol_type = other RNA
  modified_base 1: mod_base = OTHER; note = 2'-O-methylcytidine-3'-phosphorothioate
  modified_base 2: mod_base = OTHER; note = 2'-O-methyladenosine-3'-phosphorothioate
  modified_base 3: mod_base = OTHER; note = 2'-O-methylguanosine-3'-phosphate
  modified_base 4: mod_base = OTHER; note = 2'-O-methylguanosine-3'-phosphate
  modified_base 5: mod_base = OTHER; note = 2'-O-methyluridine-3'-phosphate
  modified_base 6: mod_base = OTHER; note = 2'-O-hexadecyl-guanosine-3'-phosphate
  modified_base 7: mod_base = OTHER; note = 2'-deoxy-2'-fluorouridine-3'-phosphate
  modified_base 8: mod_base = OTHER; note = 2'-O-methylguanosine-3'-phosphate
  modified_base 9: mod_base = OTHER; note = 2'-deoxy-2'-fluoroguanosine-3'-phosphate
  modified_base 10: mod_base = OTHER; note = 2'-deoxy-2'-fluoroguanosine-3'-phosphate
  modified_base 11: mod_base = OTHER; note = 2'-deoxy-2'-fluorouridine-3'-phosphate
  modified_base 12: mod_base = OTHER; note = 2'-O-methyluridine-3'-phosphate
  modified_base 13: mod_base = OTHER; note = 2'-O-methyluridine-3'-phosphate
  modified_base 14: mod_base = OTHER; note = 2'-O-methyladenosine-3'-phosphate
  modified_base 15: mod_base = OTHER; note = 2'-O-methylguanosine-3'-phosphate
  modified_base 16: mod_base = OTHER; note = 2'-O-methylguanosine-3'-phosphate
  modified_base 17: mod_base = OTHER; note = 2'-O-methyladenosine-3'-phosphate
  modified_base 18: mod_base = OTHER; note = 2'-O-methylguanosine-3'-phosphate
  modified_base 19: mod_base = OTHER; note = 2'-O-methylguanosine-3'-phosphorothioate
  modified_base 20: mod_base = OTHER; note = 2'-O-methyluridine-3'-phosphorothioate
  modified_base 21: mod_base = OTHER; note = 2'-O-methyladenosine
caggtgtgggtttaggaggta

SEQ ID NO: 878 - RNA, 21 nt, synthetic construct
  source 1..21: mol_type = other RNA
  modified_base 1: mod_base = OTHER; note = 2'-O-methyladenosine-3'-phosphorothioate
  modified_base 2: mod_base = OTHER; note = 2'-O-methylguanosine-3'-phosphorothioate
  modified_base 3: mod_base = OTHER; note = 2'-O-methylguanosine-3'-phosphate
  modified_base 4: mod_base = OTHER; note = 2'-O-methyluridine-3'-phosphate
  modified_base 5: mod_base = OTHER; note = 2'-O-methylguanosine-3'-phosphate
  modified_base 6: mod_base = OTHER; note = 2'-O-hexadecyl-uridine-3'-phosphate
  modified_base 7: mod_base = OTHER; note = 2'-deoxy-2'-fluoroguanosine-3'-phosphate
  modified_base 8: mod_base = OTHER; note = 2'-O-methylguanosine-3'-phosphate
  modified_base 9: mod_base = OTHER; note = 2'-deoxy-2'-fluoroguanosine-3'-phosphate
  modified_base 10: mod_base = OTHER; note = 2'-deoxy-2'-fluorouridine-3'-phosphate
  modified_base 11: mod_base = OTHER; note = 2'-deoxy-2'-fluorouridine-3'-phosphate
  modified_base 12: mod_base = OTHER; note = 2'-O-methyluridine-3'-phosphate
  modified_base 13: mod_base = OTHER; note = 2'-O-methyladenosine-3'-phosphate
  modified_base 14: mod_base = OTHER; note = 2'-O-methylguanosine-3'-phosphate
  modified_base 15: mod_base = OTHER; note = 2'-O-methylguanosine-3'-phosphate
  modified_base 16: mod_base = OTHER; note = 2'-O-methyladenosine-3'-phosphate
  modified_base 17: mod_base = OTHER; note = 2'-O-methylguanosine-3'-phosphate
  modified_base 18: mod_base = OTHER; note = 2'-O-methylguanosine-3'-phosphate
  modified_base 19: mod_base = OTHER; note = 2'-O-methyluridine-3'-phosphorothioate
  modified_base 20: mod_base = OTHER; note = 2'-O-methylguanosine-3'-phosphorothioate
  modified_base 21: mod_base = OTHER; note = 2'-O-methyladenosine
aggtgtgggtttaggaggtga

SEQ ID NO: 879 - RNA, 21 nt, synthetic construct
  source 1..21: mol_type = other RNA
  modified_base 1: mod_base = OTHER; note = 2'-O-methylguanosine-3'-phosphorothioate
  modified_base 2: mod_base = OTHER; note = 2'-O-methyluridine-3'-phosphorothioate
  modified_base 3: mod_base = OTHER; note = 2'-O-methylguanosine-3'-phosphate
  modified_base 4: mod_base = OTHER; note = 2'-O-methyluridine-3'-phosphate
  modified_base 5: mod_base = OTHER; note = 2'-O-methylguanosine-3'-phosphate
  modified_base 6: mod_base = OTHER; note = 2'-O-hexadecyl-guanosine-3'-phosphate
  modified_base 7: mod_base = OTHER; note = 2'-deoxy-2'-fluoroguanosine-3'-phosphate
  modified_base 8: mod_base = OTHER; note = 2'-O-methyluridine-3'-phosphate
  modified_base 9: mod_base = OTHER; note = 2'-deoxy-2'-fluorouridine-3'-phosphate
  modified_base 10: mod_base = OTHER; note = 2'-deoxy-2'-fluorouridine-3'-phosphate
  modified_base 11: mod_base = OTHER; note = 2'-deoxy-2'-fluoroadenosine-3'-phosphate
  modified_base 12: mod_base = OTHER; note = 2'-O-methylguanosine-3'-phosphate
  modified_base 13: mod_base = OTHER; note = 2'-O-methylguanosine-3'-phosphate
  modified_base 14: mod_base = OTHER; note = 2'-O-methyladenosine-3'-phosphate
  modified_base 15: mod_base = OTHER; note = 2'-O-methylguanosine-3'-phosphate
  modified_base 16: mod_base = OTHER; note = 2'-O-methylguanosine-3'-phosphate
  modified_base 17: mod_base = OTHER; note = 2'-O-methyluridine-3'-phosphate
  modified_base 18: mod_base = OTHER; note = 2'-O-methylguanosine-3'-phosphate
  modified_base 19: mod_base = OTHER; note = 2'-O-methyluridine-3'-phosphorothioate
  modified_base 20: mod_base = OTHER; note = 2'-O-methylguanosine-3'-phosphorothioate
  modified_base 21: mod_base = OTHER; note = 2'-O-methyladenosine
gtgtgggtttaggaggtgtga

SEQ ID NO: 880 - RNA, 21 nt, synthetic construct
  source 1..21: mol_type = other RNA
  modified_base 1: mod_base = OTHER; note = 2'-O-methyluridine-3'-phosphorothioate
  modified_base 2: mod_base = OTHER; note = 2'-O-methylguanosine-3'-phosphorothioate
  modified_base 3: mod_base = OTHER; note = 2'-O-methylcytidine-3'-phosphate
  modified_base 4: mod_base = OTHER; note = 2'-O-methyluridine-3'-phosphate
  modified_base 5: mod_base = OTHER; note = 2'-O-methylcytidine-3'-phosphate
  modified_base 6: mod_base = OTHER; note = 2'-O-hexadecyl-uridine-3'-phosphate
  modified_base 7: mod_base = OTHER; note = 2'-deoxy-2'-fluorocytidine-3'-phosphate
  modified_base 8: mod_base = OTHER; note = 2'-O-methyladenosine-3'-phosphate
  modified_base 9: mod_base = OTHER; note = 2'-deoxy-2'-fluorocytidine-3'-phosphate
  modified_base 10: mod_base = OTHER; note = 2'-deoxy-2'-fluoroadenosine-3'-phosphate
  modified_base 11: mod_base = OTHER; note = 2'-deoxy-2'-fluoroguanosine-3'-phosphate
  modified_base 12: mod_base = OTHER; note = 2'-O-methyluridine-3'-phosphate
  modified_base 13: mod_base = OTHER; note = 2'-O-methyladenosine-3'-phosphate
  modified_base 14: mod_base = OTHER; note = 2'-O-methylcytidine-3'-phosphate
  modified_base 15: mod_base = OTHER; note = 2'-O-methyluridine-3'-phosphate
  modified_base 16: mod_base = OTHER; note = 2'-O-methylcytidine-3'-phosphate
  modified_base 17: mod_base = OTHER; note = 2'-O-methylguanosine-3'-phosphate
  modified_base 18: mod_base = OTHER; note = 2'-O-methylcytidine-3'-phosphate
  modified_base 19: mod_base = OTHER; note = 2'-O-methyluridine-3'-phosphorothioate
  modified_base 20: mod_base = OTHER; note = 2'-O-methylguanosine-3'-phosphorothioate
  modified_base 21: mod_base = OTHER; note = 2'-O-methyladenosine
tgctctcacagtactcgctga

SEQ ID NO: 881 - RNA, 21 nt, synthetic construct
  source 1..21: mol_type = other RNA
  modified_base 1: mod_base = OTHER; note = 2'-O-methyluridine-3'-phosphorothioate
  modified_base 2: mod_base = OTHER; note = 2'-O-methylcytidine-3'-phosphorothioate
  modified_base 3: mod_base = OTHER; note = 2'-O-methyluridine-3'-phosphate
  modified_base 4: mod_base = OTHER; note = 2'-O-methylcytidine-3'-phosphate
  modified_base 5: mod_base = OTHER; note = 2'-O-methyladenosine-3'-phosphate
  modified_base 6: mod_base = OTHER; note = 2'-O-hexadecyl-cytidine-3'-phosphate
  modified_base 7: mod_base = OTHER; note = 2'-deoxy-2'-fluoroadenosine-3'-phosphate
  modified_base 8: mod_base = OTHER; note = 2'-O-methylguanosine-3'-phosphate
  modified_base 9: mod_base = OTHER; note = 2'-deoxy-2'-fluorouridine-3'-phosphate
  modified_base 10: mod_base = OTHER; note = 2'-deoxy-2'-fluoroadenosine-3'-phosphate
  modified_base 11: mod_base = OTHER; note = 2'-deoxy-2'-fluorocytidine-3'-phosphate
  modified_base 12: mod_base = OTHER; note = 2'-O-methyluridine-3'-phosphate
  modified_base 13: mod_base = OTHER; note = 2'-O-methylcytidine-3'-phosphate
  modified_base 14: mod_base = OTHER; note = 2'-O-methylguanosine-3'-phosphate
  modified_base 15: mod_base = OTHER; note = 2'-O-methylcytidine-3'-phosphate
  modified_base 16: mod_base = OTHER; note = 2'-O-methyluridine-3'-phosphate
  modified_base 17: mod_base = OTHER; note = 2'-O-methylguanosine-3'-phosphate
  modified_base 18: mod_base = OTHER; note = 2'-O-methyladenosine-3'-phosphate
  modified_base 19: mod_base = OTHER; note = 2'-O-methylguanosine-3'-phosphorothioate
  modified_base 20: mod_base = OTHER; note = 2'-O-methylguanosine-3'-phosphorothioate
  modified_base 21: mod_base = OTHER; note = 2'-O-methyladenosine
tctcacagtactcgctgagga

SEQ ID NO: 882 - RNA, 21 nt, synthetic construct
  source 1..21: mol_type = other RNA
  modified_base 1: mod_base = OTHER; note = 2'-O-methyluridine-3'-phosphorothioate
  modified_base 2: mod_base = OTHER; note = 2'-O-methylcytidine-3'-phosphorothioate
  modified_base 3: mod_base = OTHER; note = 2'-O-methyladenosine-3'-phosphate
  modified_base 4: mod_base = OTHER; note = 2'-O-methylcytidine-3'-phosphate
  modified_base 5: mod_base = OTHER; note = 2'-O-methyladenosine-3'-phosphate
  modified_base 6: mod_base = OTHER; note = 2'-O-hexadecyl-guanosine-3'-phosphate
  modified_base 7: mod_base = OTHER; note = 2'-deoxy-2'-fluorouridine-3'-phosphate
  modified_base 8: mod_base = OTHER; note = 2'-O-methyladenosine-3'-phosphate
  modified_base 9: mod_base = OTHER; note = 2'-deoxy-2'-fluorocytidine-3'-phosphate
  modified_base 10: mod_base = OTHER; note = 2'-deoxy-2'-fluorouridine-3'-phosphate
  modified_base 11: mod_base = OTHER; note = 2'-deoxy-2'-fluorocytidine-3'-phosphate
  modified_base 12: mod_base = OTHER; note = 2'-O-methylguanosine-3'-phosphate
  modified_base 13: mod_base = OTHER; note = 2'-O-methylcytidine-3'-phosphate
  modified_base 14: mod_base = OTHER; note = 2'-O-methyluridine-3'-phosphate
  modified_base 15: mod_base = OTHER; note = 2'-O-methylguanosine-3'-phosphate
  modified_base 16: mod_base = OTHER; note = 2'-O-methyladenosine-3'-phosphate
  modified_base 17: mod_base = OTHER; note = 2'-O-methylguanosine-3'-phosphate
  modified_base 18: mod_base = OTHER; note = 2'-O-methylguanosine-3'-phosphate
  modified_base 19: mod_base = OTHER; note = 2'-O-methylguanosine-3'-phosphorothioate
  modified_base 20: mod_base = OTHER; note = 2'-O-methyluridine-3'-phosphorothioate
  modified_base 21: mod_base = OTHER; note = 2'-O-methyladenosine
tcacagtactcgctgagggta

SEQ ID NO: 883 - RNA, 21 nt, synthetic construct
  source 1..21: mol_type = other RNA
  modified_base 1: mod_base = OTHER; note = 2'-O-methylguanosine-3'-phosphorothioate
  modified_base 2: mod_base = OTHER; note = 2'-O-methylcytidine-3'-phosphorothioate
  modified_base 3: mod_base = OTHER; note = 2'-O-methyluridine-3'-phosphate
  modified_base 4: mod_base = OTHER; note = 2'-O-methylguanosine-3'-phosphate
  modified_base 5: mod_base = OTHER; note = 2'-O-methyladenosine-3'-phosphate
  modified_base 6: mod_base = OTHER; note = 2'-O-hexadecyl-guanosine-3'-phosphate
  modified_base 7: mod_base = OTHER; note = 2'-deoxy-2'-fluoroguanosine-3'-phosphate
  modified_base 8: mod_base = OTHER; note = 2'-O-methylguanosine-3'-phosphate
  modified_base 9: mod_base = OTHER; note = 2'-deoxy-2'-fluorouridine-3'-phosphate
  modified_base 10: mod_base = OTHER; note = 2'-deoxy-2'-fluoroguanosine-3'-phosphate
  modified_base 11: mod_base = OTHER; note = 2'-deoxy-2'-fluoroadenosine-3'-phosphate
  modified_base 12: mod_base = OTHER; note = 2'-O-methyladenosine-3'-phosphate
  modified_base 13: mod_base = OTHER; note = 2'-O-methylcytidine-3'-phosphate
  modified_base 14: mod_base = OTHER; note = 2'-O-methyladenosine-3'-phosphate
  modified_base 15: mod_base = OTHER; note = 2'-O-methyladenosine-3'-phosphate
  modified_base 16: mod_base = OTHER; note = 2'-O-methylguanosine-3'-phosphate
  modified_base 17: mod_base = OTHER; note = 2'-O-methyladenosine-3'-phosphate
  modified_base 18: mod_base = OTHER; note = 2'-O-methyladenosine-3'-phosphate
  modified_base 19: mod_base = OTHER; note = 2'-O-methyladenosine-3'-phosphorothioate
  modified_base 20: mod_base = OTHER; note = 2'-O-methyladenosine-3'-phosphorothioate
  modified_base 21: mod_base = OTHER; note = 2'-O-methyladenosine
gctgagggtgaacaagaaaaa

SEQ ID NO: 884 - RNA, 21 nt, synthetic construct
  source 1..21: mol_type = other RNA
  modified_base 1: mod_base = OTHER; note = 2'-O-methyladenosine-3'-phosphorothioate
  modified_base 2: mod_base = OTHER; note = 2'-O-methyladenosine-3'-phosphorothioate
  modified_base 3: mod_base = OTHER; note = 2'-O-methylcytidine-3'-phosphate
  modified_base 4: mod_base = OTHER; note = 2'-O-methyladenosine-3'-phosphate
  modified_base 5: mod_base = OTHER; note = 2'-O-methyladenosine-3'-phosphate
  modified_base 6: mod_base = OTHER; note = 2'-O-hexadecyl-guanosine-3'-phosphate
  modified_base 7: mod_base = OTHER; note = 2'-deoxy-2'-fluoroadenosine-3'-phosphate
  modified_base 8: mod_base = OTHER; note = 2'-O-methyladenosine-3'-phosphate
  modified_base 9: mod_base = OTHER; note = 2'-deoxy-2'-fluoroadenosine-3'-phosphate
  modified_base 10: mod_base = OTHER; note = 2'-deoxy-2'-fluoroadenosine-3'-phosphate
  modified_base 11: mod_base = OTHER; note = 2'-deoxy-2'-fluoroguanosine-3'-phosphate
  modified_base 12: mod_base = OTHER; note = 2'-O-methyladenosine-3'-phosphate
  modified_base 13: mod_base = OTHER; note = 2'-O-methylcytidine-3'-phosphate
  modified_base 14: mod_base = OTHER; note = 2'-O-methylcytidine-3'-phosphate
  modified_base 15: mod_base = OTHER; note = 2'-O-methyluridine-3'-phosphate
  modified_base 16: mod_base = OTHER; note = 2'-O-methylguanosine-3'-phosphate
  modified_base 17: mod_base = OTHER; note = 2'-O-methyladenosine-3'-phosphate
  modified_base 18: mod_base = OTHER; note = 2'-O-methyluridine-3'-phosphate
  modified_base 19: mod_base = OTHER; note = 2'-O-methyladenosine-3'-phosphorothioate
  modified_base 20: mod_base = OTHER; note = 2'-O-methyladenosine-3'-phosphorothioate
  modified_base 21: mod_base = OTHER; note = 2'-O-methyladenosine
aacaagaaaagacctgataaa

SEQ ID NO: 885 - RNA, 21 nt, synthetic construct
  source 1..21: mol_type = other RNA
  modified_base 1: mod_base = OTHER; note = 2'-O-methyladenosine-3'-phosphorothioate
  modified_base 2: mod_base = OTHER; note = 2'-O-methyladenosine-3'-phosphorothioate
  modified_base 3: mod_base = OTHER; note = 2'-O-methylguanosine-3'-phosphate
  modified_base 4: mod_base = OTHER; note = 2'-O-methyladenosine-3'-phosphate
  modified_base 5: mod_base = OTHER; note = 2'-O-methyladenosine-3'-phosphate
  modified_base 6: mod_base = OTHER; note = 2'-O-hexadecyl-adenosine-3'-phosphate
  modified_base 7: mod_base = OTHER; note = 2'-deoxy-2'-fluoroadenosine-3'-phosphate
  modified_base 8: mod_base = OTHER; note = 2'-O-methylguanosine-3'-phosphate
  modified_base 9: mod_base = OTHER; note = 2'-deoxy-2'-fluoroadenosine-3'-phosphate
  modified_base 10: mod_base = OTHER; note = 2'-deoxy-2'-fluorocytidine-3'-phosphate
  modified_base 11: mod_base = OTHER; note = 2'-deoxy-2'-fluorocytidine-3'-phosphate
  modified_base 12: mod_base = OTHER; note = 2'-O-methyluridine-3'-phosphate
  modified_base 13: mod_base = OTHER; note = 2'-O-methylguanosine-3'-phosphate
  modified_base 14: mod_base = OTHER; note = 2'-O-methyladenosine-3'-phosphate
  modified_base 15: mod_base = OTHER; note = 2'-O-methyluridine-3'-phosphate
  modified_base 16: mod_base = OTHER; note = 2'-O-methyladenosine-3'-phosphate
  modified_base 17: mod_base = OTHER; note = 2'-O-methyladenosine-3'-phosphate
  modified_base 18: mod_base = OTHER; note = 2'-O-methyladenosine-3'-phosphate
  modified_base 19: mod_base = OTHER; note = 2'-O-methylguanosine-3'-phosphorothioate
  modified_base 20: mod_base = OTHER; note = 2'-O-methyladenosine-3'-phosphorothioate
  modified_base 21: mod_base = OTHER; note = 2'-O-methyladenosine
aagaaaagacctgataaagaa

SEQ ID NO: 886 - RNA, 21 nt, synthetic construct
  source 1..21: mol_type = other RNA
  modified_base 1: mod_base = OTHER; note = 2'-O-methyladenosine-3'-phosphorothioate
  modified_base 2: mod_base = OTHER; note = 2'-O-methylguanosine-3'-phosphorothioate
  modified_base 3: mod_base = OTHER; note = 2'-O-methyladenosine-3'-phosphate
  modified_base 4: mod_base = OTHER; note = 2'-O-methyladenosine-3'-phosphate
  modified_base 5: mod_base = OTHER; note = 2'-O-methyladenosine-3'-phosphate
  modified_base 6: mod_base = OTHER; note = 2'-O-hexadecyl-adenosine-3'-phosphate
  modified_base 7: mod_base = OTHER; note = 2'-deoxy-2'-fluoroguanosine-3'-phosphate
  modified_base 8: mod_base = OTHER; note = 2'-O-methyladenosine-3'-phosphate
  modified_base 9: mod_base = OTHER; note = 2'-deoxy-2'-fluorocytidine-3'-phosphate
  modified_base 10: mod_base = OTHER; note = 2'-deoxy-2'-fluorocytidine-3'-phosphate
  modified_base 11: mod_base = OTHER; note = 2'-deoxy-2'-fluorouridine-3'-phosphate
  modified_base 12: mod_base = OTHER; note = 2'-O-methylguanosine-3'-phosphate
  modified_base 13: mod_base = OTHER; note = 2'-O-methyladenosine-3'-phosphate
  modified_base 14: mod_base = OTHER; note = 2'-O-methyluridine-3'-phosphate
  modified_base 15: mod_base = OTHER; note = 2'-O-methyladenosine-3'-phosphate
  modified_base 16: mod_base = OTHER; note = 2'-O-methyladenosine-3'-phosphate
  modified_base 17: mod_base = OTHER; note = 2'-O-methyladenosine-3'-phosphate
  modified_base 18: mod_base = OTHER; note = 2'-O-methylguanosine-3'-phosphate
  modified_base 19: mod_base = OTHER; note = 2'-O-methyladenosine-3'-phosphorothioate
  modified_base 20: mod_base = OTHER; note = 2'-O-methyluridine-3'-phosphorothioate
  modified_base 21: mod_base = OTHER; note = 2'-O-methyladenosine
agaaaagacctgataaagata

SEQ ID NO: 887 - RNA, 21 nt, synthetic construct
  source 1..21: mol_type = other RNA
  modified_base 1: mod_base = OTHER; note = 2'-O-methylguanosine-3'-phosphorothioate
  modified_base 2: mod_base = OTHER; note = 2'-O-methyladenosine-3'-phosphorothioate
  modified_base 3: mod_base = OTHER; note = 2'-O-methyladenosine-3'-phosphate
  modified_base 4: mod_base = OTHER; note = 2'-O-methyladenosine-3'-phosphate
  modified_base 5: mod_base = OTHER; note = 2'-O-methyladenosine-3'-phosphate
  modified_base 6: mod_base = OTHER; note = 2'-O-hexadecyl-guanosine-3'-phosphate
  modified_base 7: mod_base = OTHER; note = 2'-deoxy-2'-fluoroadenosine-3'-phosphate
  modified_base 8: mod_base = OTHER; note = 2'-O-methylcytidine-3'-phosphate
  modified_base 9: mod_base = OTHER; note = 2'-deoxy-2'-fluorocytidine-3'-phosphate
  modified_base 10: mod_base = OTHER; note = 2'-deoxy-2'-fluorouridine-3'-phosphate
  modified_base 11: mod_base = OTHER; note = 2'-deoxy-2'-fluoroguanosine-3'-phosphate
  modified_base 12: mod_base = OTHER; note = 2'-O-methyladenosine-3'-phosphate
  modified_base 13: mod_base = OTHER; note = 2'-O-methyluridine-3'-phosphate
  modified_base 14: mod_base = OTHER; note = 2'-O-methyladenosine-3'-phosphate
  modified_base 15: mod_base = OTHER; note = 2'-O-methyladenosine-3'-phosphate
  modified_base 16: mod_base = OTHER; note = 2'-O-methyladenosine-3'-phosphate
  modified_base 17: mod_base = OTHER; note = 2'-O-methylguanosine-3'-phosphate
  modified_base 18: mod_base = OTHER; note = 2'-O-methyladenosine-3'-phosphate
  modified_base 19: mod_base = OTHER; note = 2'-O-methyluridine-3'-phosphorothioate
  modified_base 20: mod_base = OTHER; note = 2'-O-methyluridine-3'-phosphorothioate
  modified_base 21: mod_base = OTHER; note = 2'-O-methyladenosine
gaaaagacctgataaagatta

SEQ ID NO: 888 - RNA, 21 nt, synthetic construct
  source 1..21: mol_type = other RNA
  modified_base 1: mod_base = OTHER; note = 2'-O-methyladenosine-3'-phosphorothioate
  modified_base 2: mod_base = OTHER; note = 2'-O-methyladenosine-3'-phosphorothioate
  modified_base 3: mod_base = OTHER; note = 2'-O-methyladenosine-3'-phosphate
  modified_base 4: mod_base = OTHER; note = 2'-O-methyladenosine-3'-phosphate
  modified_base 5: mod_base = OTHER; note = 2'-O-methylguanosine-3'-phosphate
  modified_base 6: mod_base = OTHER; note = 2'-O-hexadecyl-adenosine-3'-phosphate
  modified_base 7: mod_base = OTHER; note = 2'-deoxy-2'-fluorocytidine-3'-phosphate
  modified_base 8: mod_base = OTHER; note = 2'-O-methylcytidine-3'-phosphate
  modified_base 9: mod_base = OTHER; note = 2'-deoxy-2'-fluorouridine-3'-phosphate
  modified_base 10: mod_base = OTHER; note = 2'-deoxy-2'-fluoroguanosine-3'-phosphate
  modified_base 11: mod_base = OTHER; note = 2'-deoxy-2'-fluoroadenosine-3'-phosphate
  modified_base 12: mod_base = OTHER; note = 2'-O-methyluridine-3'-phosphate
  modified_base 13: mod_base = OTHER; note = 2'-O-methyladenosine-3'-phosphate
  modified_base 14: mod_base = OTHER; note = 2'-O-methyladenosine-3'-phosphate
  modified_base 15: mod_base = OTHER; note = 2'-O-methyladenosine-3'-phosphate
  modified_base 16: mod_base = OTHER; note = 2'-O-methylguanosine-3'-phosphate
  modified_base 17: mod_base = OTHER; note = 2'-O-methyladenosine-3'-phosphate
  modified_base 18: mod_base = OTHER; note = 2'-O-methyluridine-3'-phosphate
  modified_base 19: mod_base = OTHER; note = 2'-O-methyluridine-3'-phosphorothioate
  modified_base 20: mod_base = OTHER; note = 2'-O-methyladenosine-3'-phosphorothioate
  modified_base 21: mod_base = OTHER; note = 2'-O-methyladenosine
aaaagacctgataaagattaa

SEQ ID NO: 889 - RNA, 21 nt, synthetic construct
  source 1..21: mol_type = other RNA
  modified_base 1: mod_base = OTHER; note = 2'-O-methyladenosine-3'-phosphorothioate
  modified_base 2: mod_base = OTHER; note = 2'-O-methyladenosine-3'-phosphorothioate
  modified_base 3: mod_base = OTHER; note = 2'-O-methyladenosine-3'-phosphate
  modified_base 4: mod_base = OTHER; note = 2'-O-methylguanosine-3'-phosphate
  modified_base 5: mod_base = OTHER; note = 2'-O-methyladenosine-3'-phosphate
  modified_base 6: mod_base = OTHER; note = 2'-O-hexadecyl-cytidine-3'-phosphate
  modified_base 7: mod_base = OTHER; note = 2'-deoxy-2'-fluorocytidine-3'-phosphate
  modified_base 8: mod_base = OTHER; note = 2'-O-methyluridine-3'-phosphate
  modified_base 9: mod_base = OTHER; note = 2'-deoxy-2'-fluoroguanosine-3'-phosphate
  modified_base 10: mod_base = OTHER; note = 2'-deoxy-2'-fluoroadenosine-3'-phosphate
  modified_base 11: mod_base = OTHER; note = 2'-deoxy-2'-fluorouridine-3'-phosphate
  modified_base 12: mod_base = OTHER; note = 2'-O-methyladenosine-3'-phosphate
  modified_base 13: mod_base = OTHER; note = 2'-O-methyladenosine-3'-phosphate
  modified_base 14: mod_base = OTHER; note = 2'-O-methyladenosine-3'-phosphate
  modified_base 15: mod_base = OTHER; note = 2'-O-methylguanosine-3'-phosphate
  modified_base 16: mod_base = OTHER; note = 2'-O-methyladenosine-3'-phosphate
  modified_base 17: mod_base = OTHER; note = 2'-O-methyluridine-3'-phosphate
  modified_base 18: mod_base = OTHER; note = 2'-O-methyluridine-3'-phosphate
  modified_base 19: mod_base = OTHER; note = 2'-O-methyladenosine-3'-phosphorothioate
  modified_base 20: mod_base = OTHER; note = 2'-O-methyladenosine-3'-phosphorothioate
  modified_base 21: mod_base = OTHER; note = 2'-O-methyladenosine
aaagacctgataaagattaaa

SEQ ID NO: 890 - RNA, 21 nt, synthetic construct
  source 1..21: mol_type = other RNA
  modified_base 1: mod_base = OTHER; note = 2'-O-methyladenosine-3'-phosphorothioate
  modified_base 2: mod_base = OTHER; note = 2'-O-methyladenosine-3'-phosphorothioate
  modified_base 3: mod_base = OTHER; note = 2'-O-methylguanosine-3'-phosphate
  modified_base 4: mod_base = OTHER; note = 2'-O-methyladenosine-3'-phosphate
  modified_base 5: mod_base = OTHER; note = 2'-O-methylcytidine-3'-phosphate
  modified_base 6: mod_base = OTHER; note = 2'-O-hexadecyl-cytidine-3'-phosphate
  modified_base 7: mod_base = OTHER; note = 2'-deoxy-2'-fluorouridine-3'-phosphate
  modified_base 8: mod_base = OTHER; note = 2'-O-methylguanosine-3'-phosphate
  modified_base 9: mod_base = OTHER; note = 2'-deoxy-2'-fluoroadenosine-3'-phosphate
  modified_base 10: mod_base = OTHER; note = 2'-deoxy-2'-fluorouridine-3'-phosphate
  modified_base 11: mod_base = OTHER; note = 2'-deoxy-2'-fluoroadenosine-3'-phosphate
  modified_base 12: mod_base = OTHER; note = 2'-O-methyladenosine-3'-phosphate
  modified_base 13: mod_base = OTHER; note = 2'-O-methyladenosine-3'-phosphate
  modified_base 14: mod_base = OTHER; note = 2'-O-methylguanosine-3'-phosphate
  modified_base 15: mod_base = OTHER; note = 2'-O-methyladenosine-3'-phosphate
  modified_base 16: mod_base = OTHER; note = 2'-O-methyluridine-3'-phosphate
  modified_base 17: mod_base = OTHER; note = 2'-O-methyluridine-3'-phosphate
  modified_base 18: mod_base = OTHER; note = 2'-O-methyladenosine-3'-phosphate
  modified_base 19: mod_base = OTHER; note = 2'-O-methyladenosine-3'-phosphorothioate
  modified_base 20: mod_base = OTHER; note = 2'-O-methylcytidine-3'-phosphorothioate
  modified_base 21: mod_base = OTHER; note = 2'-O-methyladenosine
aagacctgataaagattaaca

SEQ ID NO: 891 - RNA, 21 nt, synthetic construct
  source 1..21: mol_type = other RNA
  modified_base 1: mod_base = OTHER; note = 2'-O-methylguanosine-3'-phosphorothioate
  modified_base 2: mod_base = OTHER; note = 2'-O-methyladenosine-3'-phosphorothioate
  modified_base 3: mod_base = OTHER; note = 2'-O-methylcytidine-3'-phosphate
  modified_base 4: mod_base = OTHER; note = 2'-O-methylcytidine-3'-phosphate
  modified_base 5: mod_base = OTHER; note = 2'-O-methyluridine-3'-phosphate
  modified_base 6: mod_base = OTHER; note = 2'-O-hexadecyl-guanosine-3'-phosphate
  modified_base 7: mod_base = OTHER; note = 2'-deoxy-2'-fluoroadenosine-3'-phosphate
  modified_base 8: mod_base = OTHER; note = 2'-O-methyluridine-3'-phosphate
  modified_base 9: mod_base = OTHER; note = 2'-deoxy-2'-fluoroadenosine-3'-phosphate
  modified_base 10: mod_base = OTHER; note = 2'-deoxy-2'-fluoroadenosine-3'-phosphate
  modified_base 11: mod_base = OTHER; note = 2'-deoxy-2'-fluoroadenosine-3'-phosphate
  modified_base 12: mod_base = OTHER; note = 2'-O-methylguanosine-3'-phosphate
  modified_base 13: mod_base = OTHER; note = 2'-O-methyladenosine-3'-phosphate
  modified_base 14: mod_base = OTHER; note = 2'-O-methyluridine-3'-phosphate
  modified_base 15: mod_base = OTHER; note = 2'-O-methyluridine-3'-phosphate
  modified_base 16: mod_base = OTHER; note = 2'-O-methyladenosine-3'-phosphate
  modified_base 17: mod_base = OTHER; note = 2'-O-methyladenosine-3'-phosphate
  modified_base 18: mod_base = OTHER; note = 2'-O-methylcytidine-3'-phosphate
  modified_base 19: mod_base = OTHER; note = 2'-O-methylcytidine-3'-phosphorothioate
  modified_base 20: mod_base = OTHER; note = 2'-O-methyladenosine-3'-phosphorothioate
  modified_base 21: mod_base = OTHER; note = 2'-O-methyladenosine
gacctgataaagattaaccaa

SEQ ID NO: 892 - RNA, 21 nt, synthetic construct
  source 1..21: mol_type = other RNA
  modified_base 1: mod_base = OTHER; note = 2'-O-methyladenosine-3'-phosphorothioate
  modified_base 2: mod_base = OTHER; note = 2'-O-methylcytidine-3'-phosphorothioate
  modified_base 3: mod_base = OTHER; note = 2'-O-methylcytidine-3'-phosphate
  modified_base 4: mod_base = OTHER; note = 2'-O-methyluridine-3'-phosphate
  modified_base 5: mod_base = OTHER; note = 2'-O-methylguanosine-3'-phosphate
  modified_base 6: mod_base = OTHER; note = 2'-O-hexadecyl-adenosine-3'-phosphate
  modified_base 7: mod_base = OTHER; note = 2'-deoxy-2'-fluorouridine-3'-phosphate
  modified_base 8: mod_base = OTHER; note = 2'-O-methyladenosine-3'-phosphate
  modified_base 9: mod_base = OTHER; note = 2'-deoxy-2'-fluoroadenosine-3'-phosphate
  modified_base 10: mod_base = OTHER; note = 2'-deoxy-2'-fluoroadenosine-3'-phosphate
  modified_base 11: mod_base = OTHER; note = 2'-deoxy-2'-fluoroguanosine-3'-phosphate
  modified_base 12: mod_base = OTHER; note = 2'-O-methyladenosine-3'-phosphate
  modified_base 13: mod_base = OTHER; note = 2'-O-methyluridine-3'-phosphate
  modified_base 14: mod_base = OTHER; note = 2'-O-methyluridine-3'-phosphate
  modified_base 15: mod_base = OTHER; note = 2'-O-methyladenosine-3'-phosphate
  modified_base 16: mod_base = OTHER; note = 2'-O-methyladenosine-3'-phosphate
  modified_base 17: mod_base = OTHER; note = 2'-O-methylcytidine-3'-phosphate
  modified_base 18: mod_base = OTHER; note = 2'-O-methylcytidine-3'-phosphate
  modified_base 19: mod_base = OTHER; note = 2'-O-methyladenosine-3'-phosphorothioate
  modified_base 20: mod_base = OTHER; note = 2'-O-methylguanosine-3'-phosphorothioate
  modified_base 21: mod_base = OTHER; note = 2'-O-methyladenosine
acctgataaagattaaccaga

SEQ ID NO: 893 - RNA, 21 nt, synthetic construct
  source 1..21: mol_type = other RNA
  modified_base 1: mod_base = OTHER; note = 2'-O-methyladenosine-3'-phosphorothioate
  modified_base 2: mod_base = OTHER; note = 2'-O-methyladenosine-3'-phosphorothioate
  modified_base 3: mod_base = OTHER; note = 2'-O-methyladenosine-3'-phosphate
  modified_base 4: mod_base = OTHER; note = 2'-O-methylguanosine-3'-phosphate
  modified_base 5: mod_base = OTHER; note = 2'-O-methyladenosine-3'-phosphate
  modified_base 6: mod_base = OTHER; note = 2'-O-hexadecyl-uridine-3'-phosphate
  modified_base 7: mod_base = OTHER; note = 2'-deoxy-2'-fluorouridine-3'-phosphate
  modified_base 8: mod_base = OTHER; note = 2'-O-methyladenosine-3'-phosphate
  modified_base 9: mod_base = OTHER; note = 2'-deoxy-2'-fluoroadenosine-3'-phosphate
  modified_base 10: mod_base = OTHER; note = 2'-deoxy-2'-fluorocytidine-3'-phosphate
  modified_base 11: mod_base = OTHER; note = 2'-deoxy-2'-fluorocytidine-3'-phosphate
  modified_base 12: mod_base = OTHER; note = 2'-O-methyladenosine-3'-phosphate
  modified_base 13: mod_base = OTHER; note = 2'-O-methylguanosine-3'-phosphate
  modified_base 14: mod_base = OTHER; note = 2'-O-methyladenosine-3'-phosphate
  modified_base 15: mod_base = OTHER; note = 2'-O-methyladenosine-3'-phosphate
  modified_base 16: mod_base = OTHER; note = 2'-O-methylguanosine-3'-phosphate
  modified_base 17: mod_base = OTHER; note = 2'-O-methyladenosine-3'-phosphate
  modified_base 18: mod_base = OTHER; note = 2'-O-methyladenosine-3'-phosphate
  modified_base 19: mod_base = OTHER; note = 2'-O-methyladenosine-3'-phosphorothioate
  modified_base 20: mod_base = OTHER; note = 2'-O-methyladenosine-3'-phosphorothioate
  modified_base 21: mod_base = OTHER; note = 2'-O-methyladenosine
aaagattaaccagaagaaaaa

SEQ ID NO: 894 - RNA, 21 nt, synthetic construct
  source 1..21: mol_type = other RNA
  modified_base 1: mod_base = OTHER; note = 2'-O-methyladenosine-3'-phosphorothioate
  modified_base 2: mod_base = OTHER; note = 2'-O-methyluridine-3'-phosphorothioate
  modified_base 3: mod_base = OTHER; note = 2'-O-methyluridine-3'-phosphate
  modified_base 4: mod_base = OTHER; note = 2'-O-methyladenosine-3'-phosphate
  modified_base 5: mod_base = OTHER; note = 2'-O-methyladenosine-3'-phosphate
  modified_base 6: mod_base = OTHER; note = 2'-O-hexadecyl-cytidine-3'-phosphate
  modified_base 7: mod_base = OTHER; note = 2'-deoxy-2'-fluorocytidine-3'-phosphate
  modified_base 8: mod_base = OTHER; note = 2'-O-methyladenosine-3'-phosphate
  modified_base 9: mod_base = OTHER; note = 2'-deoxy-2'-fluoroguanosine-3'-phosphate
  modified_base 10: mod_base = OTHER; note = 2'-deoxy-2'-fluoroadenosine-3'-phosphate
  modified_base 11: mod_base = OTHER; note = 2'-deoxy-2'-fluoroadenosine-3'-phosphate
  modified_base 12: mod_base = OTHER; note = 2'-O-methylguanosine-3'-phosphate
  modified_base 13: mod_base = OTHER; note = 2'-O-methyladenosine-3'-phosphate
  modified_base 14: mod_base = OTHER; note = 2'-O-methyladenosine-3'-phosphate
  modified_base 15: mod_base = OTHER; note = 2'-O-methyladenosine-3'-phosphate
  modified_base 16: mod_base = OTHER; note = 2'-O-methyladenosine-3'-phosphate
  modified_base 17: mod_base = OTHER; note = 2'-O-methylcytidine-3'-phosphate
  modified_base 18: mod_base = OTHER; note = 2'-O-methyladenosine-3'-phosphate
  modified_base 19: mod_base = OTHER; note = 2'-O-methyladenosine-3'-phosphorothioate
  modified_base 20: mod_base = OTHER; note = 2'-O-methylguanosine-3'-phosphorothioate
  modified_base 21: mod_base = OTHER; note = 2'-O-methyladenosine
attaaccagaagaaaacaaga

SEQ ID NO: 895 - RNA, 21 nt, synthetic construct
  source 1..21: mol_type = other RNA
  modified_base 1: mod_base = OTHER; note = 2'-O-methyladenosine-3'-phosphorothioate
  modified_base 2: mod_base = OTHER; note = 2'-O-methyladenosine-3'-phosphorothioate
  modified_base 3: mod_base = OTHER; note = 2'-O-methylcytidine-3'-phosphate
  modified_base 4: mod_base = OTHER; note = 2'-O-methylcytidine-3'-phosphate
  modified_base 5: mod_base = OTHER; note = 2'-O-methyladenosine-3'-phosphate
  modified_base 6: mod_base = OTHER; note = 2'-O-hexadecyl-guanosine-3'-phosphate
  modified_base 7: mod_base = OTHER; note = 2'-deoxy-2'-fluoroadenosine-3'-phosphate
  modified_base 8: mod_base = OTHER; note = 2'-O-methyladenosine-3'-phosphate
  modified_base 9: mod_base = OTHER; note = 2'-deoxy-2'-fluoroguanosine-3'-phosphate
  modified_base 10: mod_base = OTHER; note = 2'-deoxy-2'-fluoroadenosine-3'-phosphate
  modified_base 11: mod_base = OTHER; note = 2'-deoxy-2'-fluoroadenosine-3'-phosphate
  modified_base 12: mod_base = OTHER; note = 2'-O-methyladenosine-3'-phosphate
  modified_base 13: mod_base = OTHER; note = 2'-O-methyladenosine-3'-phosphate
  modified_base 14: mod_base = OTHER; note = 2'-O-methylcytidine-3'-phosphate
  modified_base 15: mod_base = OTHER; note = 2'-O-methyladenosine-3'-phosphate
  modified_base 16: mod_base = OTHER; note = 2'-O-methyladenosine-3'-phosphate
  modified_base 17: mod_base = OTHER; note = 2'-O-methylguanosine-3'-phosphate
  modified_base 18: mod_base = OTHER; note = 2'-O-methylguanosine-3'-phosphate
  modified_base 19: mod_base = OTHER; note = 2'-O-methyladenosine-3'-phosphorothioate
  modified_base 20: mod_base = OTHER; note = 2'-O-methylguanosine-3'-phosphorothioate
  modified_base 21: mod_base = OTHER; note = 2'-O-methyladenosine
aaccagaagaaaacaaggaga

SEQ ID NO: 896 - RNA, 21 nt, synthetic construct
  source 1..21: mol_type = other RNA
  modified_base 1: mod_base = OTHER; note = 2'-O-methylguanosine-3'-phosphorothioate
  modified_base 2: mod_base = OTHER; note = 2'-O-methylguanosine-3'-phosphorothioate
  modified_base 3: mod_base = OTHER; note = 2'-O-methyladenosine-3'-phosphate
  modified_base 4: mod_base = OTHER; note = 2'-O-methylguanosine-3'-phosphate
  modified_base 5: mod_base = OTHER; note = 2'-O-methylguanosine-3'-phosphate
  modified_base 6: mod_base = OTHER; note = 2'-O-hexadecyl-guanosine-3'-phosphate
  modified_base 7: mod_base = OTHER; note = 2'-deoxy-2'-fluoroadenosine-3'-phosphate
  modified_base 8: mod_base = OTHER; note = 2'-O-methyladenosine-3'-phosphate
  modified_base 9: mod_base = OTHER; note = 2'-deoxy-2'-fluoroadenosine-3'-phosphate
  modified_base 10: mod_base = OTHER; note = 2'-deoxy-2'-fluorocytidine-3'-phosphate
  modified_base 11: mod_base = OTHER; note = 2'-deoxy-2'-fluoroadenosine-3'-phosphate
  modified_base 12: mod_base = OTHER; note = 2'-O-methyladenosine-3'-phosphate
  modified_base 13: mod_base = OTHER; note = 2'-O-methylcytidine-3'-phosphate
  modified_base 14: mod_base = OTHER; note = 2'-O-methylcytidine-3'-phosphate
  modified_base 15: mod_base = OTHER; note = 2'-O-methylguanosine-3'-phosphate
  modified_base 16: mod_base = OTHER; note = 2'-O-methylcytidine-3'-phosphate
  modified_base 17: mod_base = OTHER; note = 2'-O-methyladenosine-3'-phosphate
  modified_base 18: mod_base = OTHER; note = 2'-O-methylguanosine-3'-phosphate
  modified_base 19: mod_base = OTHER; note = 2'-O-methylcytidine-3'-phosphorothioate
  modified_base 20: mod_base = OTHER; note = 2'-O-methylcytidine-3'-phosphorothioate
  modified_base 21: mod_base = OTHER; note = 2'-O-methyladenosine
ggagggaaacaaccgcagcca

SEQ ID NO: 897 - RNA, 21 nt, synthetic construct
  source 1..21: mol_type = other RNA
  modified_base 1: mod_base = OTHER; note = 2'-O-methylguanosine-3'-phosphorothioate
  modified_base 2: mod_base = OTHER; note = 2'-O-methyladenosine-3'-phosphorothioate
  modified_base 3: mod_base = OTHER; note = 2'-O-methylguanosine-3'-phosphate
  modified_base 4: mod_base = OTHER; note = 2'-O-methylguanosine-3'-phosphate
  modified_base 5: mod_base = OTHER; note = 2'-O-methylguanosine-3'-phosphate
  modified_base 6: mod_base = OTHER; note = 2'-O-hexadecyl-adenosine-3'-phosphate
  modified_base 7: mod_base = OTHER; note = 2'-deoxy-2'-fluoroadenosine-3'-phosphate
  modified_base 8: mod_base = OTHER; note = 2'-O-methyladenosine-3'-phosphate
  modified_base 9: mod_base = OTHER; note = 2'-deoxy-2'-fluorocytidine-3'-phosphate
  modified_base 10: mod_base = OTHER; note = 2'-deoxy-2'-fluoroadenosine-3'-phosphate
  modified_base 11: mod_base = OTHER; note = 2'-deoxy-2'-fluoroadenosine-3'-phosphate
  modified_base 12: mod_base = OTHER; note = 2'-O-methylcytidine-3'-phosphate
  modified_base 13: mod_base = OTHER; note = 2'-O-methylcytidine-3'-phosphate
  modified_base 14: mod_base = OTHER; note = 2'-O-methylguanosine-3'-phosphate
  modified_base 15: mod_base = OTHER; note = 2'-O-methylcytidine-3'-phosphate
  modified_base 16: mod_base = OTHER; note = 2'-O-methyladenosine-3'-phosphate
  modified_base 17: mod_base = OTHER; note = 2'-O-methylguanosine-3'-phosphate
  modified_base 18: mod_base = OTHER; note = 2'-O-methylcytidine-3'-phosphate
  modified_base 19: mod_base = OTHER; note = 2'-O-methylcytidine-3'-phosphorothioate
  modified_base 20: mod_base = OTHER; note = 2'-O-methyluridine-3'-phosphorothioate
  modified_base 21: mod_base = OTHER; note = 2'-O-methyladenosine
gagggaaacaaccgcagccta

SEQ ID NO: 898 - RNA, 21 nt, synthetic construct
  source 1..21: mol_type = other RNA
  modified_base 1: mod_base = OTHER; note = 2'-O-methylcytidine-3'-phosphorothioate
  modified_base 2: mod_base = OTHER; note = 2'-O-methyladenosine-3'-phosphorothioate
  modified_base 3: mod_base = OTHER; note = 2'-O-methylguanosine-3'-phosphate
  modified_base 4: mod_base = OTHER; note = 2'-O-methylcytidine-3'-phosphate
  modified_base 5: mod_base = OTHER; note = 2'-O-methylcytidine-3'-phosphate
  modified_base 6: mod_base = OTHER; note = 2'-O-hexadecyl-uridine-3'-phosphate
  modified_base 7: mod_base = OTHER; note = 2'-deoxy-2'-fluoroguanosine-3'-phosphate
  modified_base 8: mod_base = OTHER; note = 2'-O-methyluridine-3'-phosphate
  modified_base 9: mod_base = OTHER; note = 2'-deoxy-2'-fluoroadenosine-3'-phosphate
  modified_base 10: mod_base = OTHER; note = 2'-deoxy-2'-fluoroguanosine-3'-phosphate
  modified_base 11: mod_base = OTHER; note = 2'-deoxy-2'-fluorocytidine-3'-phosphate
  modified_base 12: mod_base = OTHER; note = 2'-O-methyladenosine-3'-phosphate
  modified_base 13: mod_base = OTHER; note = 2'-O-methyladenosine-3'-phosphate
  modified_base 14: mod_base = OTHER; note = 2'-O-methylguanosine-3'-phosphate
  modified_base 15: mod_base = OTHER; note = 2'-O-methylcytidine-3'-phosphate
  modified_base 16: mod_base = OTHER; note = 2'-O-methyluridine-3'-phosphate
  modified_base 17: mod_base = OTHER; note = 2'-O-methylcytidine-3'-phosphate
  modified_base 18: mod_base = OTHER; note = 2'-O-methyluridine-3'-phosphate
  modified_base 19: mod_base = OTHER; note = 2'-O-methylguanosine-3'-phosphorothioate
  modified_base 20: mod_base = OTHER; note = 2'-O-methylguanosine-3'-phosphorothioate
  modified_base 21: mod_base = OTHER; note = 2'-O-methyladenosine
cagcctgtagcaagctctgga

SEQ ID NO: 899 - RNA, 21 nt, synthetic construct
  source 1..21: mol_type = other RNA
  modified_base 1: mod_base = OTHER; note = 2'-O-methylcytidine-3'-phosphorothioate
  modified_base 2: mod_base = OTHER; note = 2'-O-methyluridine-3'-phosphorothioate
  modified_base 3: mod_base = OTHER; note = 2'-O-methylcytidine-3'-phosphate
  modified_base 4: mod_base = OTHER; note = 2'-O-methyluridine-3'-phosphate
  modified_base 5: mod_base = OTHER; note = 2'-O-methylguanosine-3'-phosphate
  modified_base 6: mod_base = OTHER; note = 2'-O-hexadecyl-guanosine-3'-phosphate
  modified_base 7: mod_base = OTHER; note = 2'-deoxy-2'-fluoroadenosine-3'-phosphate
  modified_base 8: mod_base = OTHER; note = 2'-O-methyladenosine-3'-phosphate
  modified_base 9: mod_base = OTHER; note = 2'-deoxy-2'-fluorocytidine-3'-phosphate
  modified_base 10: mod_base = OTHER; note = 2'-deoxy-2'-fluorouridine-3'-phosphate
  modified_base 11: mod_base = OTHER; note = 2'-deoxy-2'-fluorocytidine-3'-phosphate
  modified_base 12: mod_base = OTHER; note = 2'-O-methyladenosine-3'-phosphate
  modified_base 13: mod_base = OTHER; note = 2'-O-methylguanosine-3'-phosphate
  modified_base 14: mod_base = OTHER; note = 2'-O-methylguanosine-3'-phosphate
  modified_base 15: mod_base = OTHER; note = 2'-O-methyladenosine-3'-phosphate
  modified_base 16: mod_base = OTHER; note = 2'-O-methylguanosine-3'-phosphate
  modified_base 17: mod_base = OTHER; note = 2'-O-methyluridine-3'-phosphate
  modified_base 18: mod_base = OTHER; note = 2'-O-methylcytidine-3'-phosphate
  modified_base 19: mod_base = OTHER; note = 2'-O-methylguanosine-3'-phosphorothioate
  modified_base 20: mod_base = OTHER; note = 2'-O-methylcytidine-3'-phosphorothioate
  modified_base 21: mod_base = OTHER; note = 2'-O-methyladenosine
ctctggaactcaggagtcgca

SEQ ID NO: 900 - RNA, 21 nt, synthetic construct
  source 1..21: mol_type = other RNA
  modified_base 1: mod_base = OTHER; note = 2'-O-methyluridine-3'-phosphorothioate
  modified_base 2: mod_base = OTHER; note = 2'-O-methylcytidine-3'-phosphorothioate
  modified_base 3: mod_base = OTHER; note = 2'-O-methyluridine-3'-phosphate
  modified_base 4: mod_base = OTHER; note = 2'-O-methylcytidine-3'-phosphate
  modified_base 5: mod_base = OTHER; note = 2'-O-methylcytidine-3'-phosphate
  modified_base 6: mod_base = OTHER; note = 2'-O-hexadecyl-uridine-3'-phosphate
  modified_base 7: mod_base = OTHER; note = 2'-deoxy-2'-fluorocytidine-3'-phosphate
  modified_base 8: mod_base = OTHER; note = 2'-O-methyladenosine-3'-phosphate
  modified_base 9: mod_base = OTHER; note = 2'-deoxy-2'-fluoroguanosine-3'-phosphate
  modified_base 10: mod_base = OTHER; note = 2'-deoxy-2'-fluoroadenosine-3'-phosphate
  modified_base 11: mod_base = OTHER; note = 2'-deoxy-2'-fluoroguanosine-3'-phosphate
  modified_base 12: mod_base = OTHER; note = 2'-O-methylcytidine-3'-phosphate
  modified_base 13: mod_base = OTHER; note = 2'-O-methyluridine-3'-phosphate
  modified_base 14: mod_base = OTHER; note = 2'-O-methylcytidine-3'-phosphate
  modified_base 15: mod_base = OTHER; note = 2'-O-methylguanosine-3'-phosphate
  modified_base 16: mod_base = OTHER; note = 2'-O-methyladenosine-3'-phosphate
  modified_base 17: mod_base = OTHER; note = 2'-O-methylcytidine-3'-phosphate
  modified_base 18: mod_base = OTHER; note = 2'-O-methylguanosine-3'-phosphate
  modified_base 19: mod_base = OTHER; note = 2'-O-methylcytidine-3'-phosphorothioate
  modified_base 20: mod_base = OTHER; note = 2'-O-methyladenosine-3'-phosphorothioate
  modified_base 21: mod_base = OTHER; note = 2'-O-methyladenosine
tctcctcagagctcgacgcaa

SEQ ID NO: 901 - RNA, 21 nt, synthetic construct
  source 1..21: mol_type = other RNA
  modified_base 1: mod_base = OTHER; note = 2'-O-methyluridine-3'-phosphorothioate
  modified_base 2: mod_base = OTHER; note = 2'-O-methylcytidine-3'-phosphorothioate
  modified_base 3: mod_base = OTHER; note = 2'-O-methylcytidine-3'-phosphate
  modified_base 4: mod_base = OTHER; note = 2'-O-methyluridine-3'-phosphate
  modified_base 5: mod_base = OTHER; note = 2'-O-methylcytidine-3'-phosphate
  modified_base 6: mod_base = OTHER; note = 2'-O-hexadecyl-adenosine-3'-phosphate
  modified_base 7: mod_base = OTHER; note = 2'-deoxy-2'-fluoroguanosine-3'-phosphate
  modified_base 8: mod_base = OTHER; note = 2'-O-methyladenosine-3'-phosphate
  modified_base 9: mod_base = OTHER; note = 2'-deoxy-2'-fluoroguanosine-3'-phosphate
  modified_base 10: mod_base = OTHER; note = 2'-deoxy-2'-fluorocytidine-3'-phosphate
  modified_base 11: mod_base = OTHER; note = 2'-deoxy-2'-fluorouridine-3'-phosphate
  modified_base 12: mod_base = OTHER; note = 2'-O-methylcytidine-3'-phosphate
  modified_base 13: mod_base = OTHER; note = 2'-O-methylguanosine-3'-phosphate
  modified_base 14: mod_base = OTHER; note = 2'-O-methyladenosine-3'-phosphate
  modified_base 15: mod_base = OTHER; note = 2'-O-methylcytidine-3'-phosphate
  modified_base 16: mod_base = OTHER; note = 2'-O-methylguanosine-3'-phosphate
  modified_base 17: mod_base = OTHER; note = 2'-O-methylcytidine-3'-phosphate
  modified_base 18: mod_base = OTHER; note = 2'-O-methyladenosine-3'-phosphate
  modified_base 19: mod_base = OTHER; note = 2'-O-methyluridine-3'-phosphorothioate
  modified_base 20: mod_base = OTHER; note = 2'-O-methyluridine-3'-phosphorothioate
  modified_base 21: mod_base = OTHER; note = 2'-O-methyladenosine
tcctcagagctcgacgcatta

SEQ ID NO: 902 - RNA, 21 nt, synthetic construct
  source 1..21: mol_type = other RNA
  modified_base 1: mod_base = OTHER; note = 2'-O-methyladenosine-3'-phosphorothioate
  modified_base 2: mod_base = OTHER; note = 2'-O-methylcytidine-3'-phosphorothioate
  modified_base 3: mod_base = OTHER; note = 2'-O-methyluridine-3'-phosphate
  modified_base 4: mod_base = OTHER; note = 2'-O-methyluridine-3'-phosphate
  modified_base 5: mod_base = OTHER; note = 2'-O-methyluridine-3'-phosphate
  modified_base 6: mod_base = OTHER; note = 2'-O-hexadecyl-cytidine-3'-phosphate
  modified_base 7: mod_base = OTHER; note = 2'-deoxy-2'-fluorocytidine-3'-phosphate
  modified_base 8: mod_base = OTHER; note = 2'-O-methylcytidine-3'-phosphate
  modified_base 9: mod_base = OTHER; note = 2'-deoxy-2'-fluorouridine-3'-phosphate
  modified_base 10: mod_base = OTHER; note = 2'-deoxy-2'-fluorocytidine-3'-phosphate
  modified_base 11: mod_base = OTHER; note = 2'-deoxy-2'-fluorouridine-3'-phosphate
  modified_base 12: mod_base = OTHER; note = 2'-O-methylcytidine-3'-phosphate
  modified_base 13: mod_base = OTHER; note = 2'-O-methyladenosine-3'-phosphate
  modified_base 14: mod_base = OTHER; note = 2'-O-methyluridine-3'-phosphate
  modified_base 15: mod_base = OTHER; note = 2'-O-methyluridine-3'-phosphate
  modified_base 16: mod_base = OTHER; note = 2'-O-methyluridine-3'-phosphate
  modified_base 17: mod_base = OTHER; note = 2'-O-methylcytidine-3'-phosphate
  modified_base 18: mod_base = OTHER; note = 2'-O-methyluridine-3'-phosphate
  modified_base 19: mod_base = OTHER; note = 2'-O-methylcytidine-3'-phosphorothioate
  modified_base 20: mod_base = OTHER; note = 2'-O-methyluridine-3'-phosphorothioate
  modified_base 21: mod_base = OTHER; note = 2'-O-methyladenosine
actttccctctcatttctcta

SEQ ID NO: 903 - RNA, 21 nt, synthetic construct
  source 1..21: mol_type = other RNA
  modified_base 1: mod_base = OTHER; note = 2'-O-methylcytidine-3'-phosphorothioate
  modified_base 2: mod_base = OTHER; note = 2'-O-methyluridine-3'-phosphorothioate
  modified_base 3: mod_base = OTHER; note = 2'-O-methyluridine-3'-phosphate
  modified_base 4: mod_base = OTHER; note = 2'-O-methyluridine-3'-phosphate
  modified_base 5: mod_base = OTHER; note = 2'-O-methylcytidine-3'-phosphate
  modified_base 6: mod_base = OTHER; note = 2'-O-hexadecyl-cytidine-3'-phosphate
  modified_base 7: mod_base = OTHER; note = 2'-deoxy-2'-fluorocytidine-3'-phosphate
  modified_base 8: mod_base = OTHER; note = 2'-O-methyluridine-3'-phosphate
  modified_base 9: mod_base = OTHER; note = 2'-deoxy-2'-fluorocytidine-3'-phosphate
  modified_base 10: mod_base = OTHER; note = 2'-deoxy-2'-fluorouridine-3'-phosphate
  modified_base 11: mod_base = OTHER; note = 2'-deoxy-2'-fluorocytidine-3'-phosphate
  modified_base 12: mod_base = OTHER; note = 2'-O-methyladenosine-3'-phosphate
  modified_base 13: mod_base = OTHER; note = 2'-O-methyluridine-3'-phosphate
  modified_base 14: mod_base = OTHER; note = 2'-O-methyluridine-3'-phosphate
  modified_base 15: mod_base = OTHER; note = 2'-O-methyluridine-3'-phosphate
  modified_base 16: mod_base = OTHER; note = 2'-O-methylcytidine-3'-phosphate
  modified_base 17: mod_base = OTHER; note = 2'-O-methyluridine-3'-phosphate
  modified_base 18: mod_base = OTHER; note = 2'-O-methylcytidine-3'-phosphate
  modified_base 19: mod_base = OTHER; note = 2'-O-methyluridine-3'-phosphorothioate
  modified_base 20: mod_base = OTHER; note = 2'-O-methylguanosine-3'-phosphorothioate
  modified_base 21: mod_base = OTHER; note = 2'-O-methyladenosine
ctttccctctcatttctctga

SEQ ID NO: 904 - RNA, 21 nt, synthetic construct
  source 1..21: mol_type = other RNA
  modified_base 1: mod_base = OTHER; note = 2'-O-methyluridine-3'-phosphorothioate
  modified_base 2: mod_base = OTHER; note = 2'-O-methyluridine-3'-phosphorothioate
  modified_base 3: mod_base = OTHER; note = 2'-O-methyluridine-3'-phosphate
  modified_base 4: mod_base = OTHER; note = 2'-O-methylcytidine-3'-phosphate
  modified_base 5: mod_base = OTHER; note = 2'-O-methylcytidine-3'-phosphate
  modified_base 6: mod_base = OTHER; note = 2'-O-hexadecyl-cytidine-3'-phosphate
  modified_base 7: mod_base = OTHER; note = 2'-deoxy-2'-fluorouridine-3'-phosphate
  modified_base 8: mod_base = OTHER; note = 2'-O-methylcytidine-3'-phosphate
  modified_base 9: mod_base = OTHER; note = 2'-deoxy-2'-fluorouridine-3'-phosphate
  modified_base 10: mod_base = OTHER; note = 2'-deoxy-2'-fluorocytidine-3'-phosphate
  modified_base 11: mod_base = OTHER; note = 2'-deoxy-2'-fluoroadenosine-3'-phosphate
  modified_base 12: mod_base = OTHER; note = 2'-O-methyluridine-3'-phosphate
  modified_base 13: mod_base = OTHER; note = 2'-O-methyluridine-3'-phosphate
  modified_base 14: mod_base = OTHER; note = 2'-O-methyluridine-3'-phosphate
  modified_base 15: mod_base = OTHER; note = 2'-O-methylcytidine-3'-phosphate
  modified_base 16: mod_base = OTHER; note = 2'-O-methyluridine-3'-phosphate
  modified_base 17: mod_base = OTHER; note = 2'-O-methylcytidine-3'-phosphate
  modified_base 18: mod_base = OTHER; note = 2'-O-methyluridine-3'-phosphate
  modified_base 19: mod_base = OTHER; note = 2'-O-methylguanosine-3'-phosphorothioate
  modified_base 20: mod_base = OTHER; note = 2'-O-methyladenosine-3'-phosphorothioate
  modified_base 21: mod_base = OTHER; note = 2'-O-methyladenosine
tttccctctcatttctctgaa

SEQ ID NO: 905 - RNA, 21 nt, synthetic construct
  source 1..21: mol_type = other RNA
  modified_base 1: mod_base = OTHER; note = 2'-O-methyluridine-3'-phosphorothioate
  modified_base 2: mod_base = OTHER; note = 2'-O-methylcytidine-3'-phosphorothioate
  modified_base 3: mod_base = OTHER; note = 2'-O-methylcytidine-3'-phosphate
  modified_base 4: mod_base = OTHER; note = 2'-O-methylcytidine-3'-phosphate
  modified_base 5: mod_base = OTHER; note = 2'-O-methyluridine-3'-phosphate
  modified_base 6: mod_base = OTHER; note = 2'-O-hexadecyl-cytidine-3'-phosphate
  modified_base 7: mod_base = OTHER; note = 2'-deoxy-2'-fluorouridine-3'-phosphate
  modified_base 8: mod_base = OTHER; note = 2'-O-methylcytidine-3'-phosphate
  modified_base 9: mod_base = OTHER; note = 2'-deoxy-2'-fluoroadenosine-3'-phosphate
  modified_base 10: mod_base = OTHER; note = 2'-deoxy-2'-fluorouridine-3'-phosphate
  modified_base 11: mod_base = OTHER; note = 2'-deoxy-2'-fluorouridine-3'-phosphate
  modified_base 12: mod_base = OTHER; note = 2'-O-methyluridine-3'-phosphate
  modified_base 13: mod_base = OTHER; note = 2'-O-methylcytidine-3'-phosphate
  modified_base 14: mod_base = OTHER; note = 2'-O-methyluridine-3'-phosphate
  modified_base 15: mod_base = OTHER; note = 2'-O-methylcytidine-3'-phosphate
  modified_base 16: mod_base = OTHER; note = 2'-O-methyluridine-3'-phosphate
  modified_base 17: mod_base = OTHER; note = 2'-O-methylguanosine-3'-phosphate
  modified_base 18: mod_base = OTHER; note = 2'-O-methyladenosine-3'-phosphate
  modified_base 19: mod_base = OTHER; note = 2'-O-methylcytidine-3'-phosphorothioate
  modified_base 20: mod_base = OTHER; note = 2'-O-methylcytidine-3'-phosphorothioate
  modified_base 21: mod_base = OTHER; note = 2'-O-methyladenosine
tccctctcatttctctgacca

SEQ ID NO: 906 - RNA, 21 nt, synthetic construct
  source 1..21: mol_type = other RNA
  modified_base 1: mod_base = OTHER; note = 2'-O-methylcytidine-3'-phosphorothioate
  modified_base 2: mod_base = OTHER; note = 2'-O-methylcytidine-3'-phosphorothioate
  modified_base 3: mod_base = OTHER; note = 2'-O-methylcytidine-3'-phosphate
  modified_base 4: mod_base = OTHER; note = 2'-O-methyluridine-3'-phosphate
  modified_base 5: mod_base = OTHER; note = 2'-O-methylcytidine-3'-phosphate
  modified_base 6: mod_base = OTHER; note = 2'-O-hexadecyl-uridine-3'-phosphate
  modified_base 7: mod_base = OTHER; note = 2'-deoxy-2'-fluorocytidine-3'-phosphate
  modified_base 8: mod_base = OTHER; note = 2'-O-methyladenosine-3'-phosphate
  modified_base 9: mod_base = OTHER; note = 2'-deoxy-2'-fluorouridine-3'-phosphate
  modified_base 10: mod_base = OTHER; note = 2'-deoxy-2'-fluorouridine-3'-phosphate
  modified_base 11: mod_base = OTHER; note = 2'-deoxy-2'-fluorouridine-3'-phosphate
  modified_base 12: mod_base = OTHER; note = 2'-O-methylcytidine-3'-phosphate
  modified_base 13: mod_base = OTHER; note = 2'-O-methyluridine-3'-phosphate
  modified_base 14: mod_base = OTHER; note = 2'-O-methylcytidine-3'-phosphate
  modified_base 15: mod_base = OTHER; note = 2'-O-methyluridine-3'-phosphate
  modified_base 16: mod_base = OTHER; note = 2'-O-methylguanosine-3'-phosphate
  modified_base 17: mod_base = OTHER; note = 2'-O-methyladenosine-3'-phosphate
  modified_base 18: mod_base = OTHER; note = 2'-O-methylcytidine-3'-phosphate
  modified_base 19: mod_base = OTHER; note = 2'-O-methylcytidine-3'-phosphorothioate
  modified_base 20: mod_base = OTHER; note = 2'-O-methylguanosine-3'-phosphorothioate
  modified_base 21: mod_base = OTHER; note = 2'-O-methyladenosine
ccctctcatttctctgaccga

SEQ ID NO: 907 - RNA, 21 nt, synthetic construct
  source 1..21: mol_type = other RNA
  modified_base 1: mod_base = OTHER; note = 2'-O-methylcytidine-3'-phosphorothioate
  modified_base 2: mod_base = OTHER; note = 2'-O-methylcytidine-3'-phosphorothioate
  modified_base 3: mod_base = OTHER; note = 2'-O-methyluridine-3'-phosphate
  modified_base 4: mod_base = OTHER; note = 2'-O-methylcytidine-3'-phosphate
  modified_base 5: mod_base = OTHER; note = 2'-O-methyluridine-3'-phosphate
  modified_base 6: mod_base = OTHER; note = 2'-O-hexadecyl-cytidine-3'-phosphate
  modified_base 7: mod_base = OTHER; note = 2'-deoxy-2'-fluoroadenosine-3'-phosphate
  modified_base 8: mod_base = OTHER; note = 2'-O-methyluridine-3'-phosphate
  modified_base 9: mod_base = OTHER; note = 2'-deoxy-2'-fluorouridine-3'-phosphate
  modified_base 10: mod_base = OTHER; note = 2'-deoxy-2'-fluorouridine-3'-phosphate
  modified_base 11: mod_base = OTHER; note = 2'-deoxy-2'-fluorocytidine-3'-phosphate
  modified_base 12: mod_base = OTHER; note = 2'-O-methyluridine-3'-phosphate
  modified_base 13: mod_base = OTHER; note = 2'-O-methylcytidine-3'-phosphate
  modified_base 14: mod_base = OTHER; note = 2'-O-methyluridine-3'-phosphate
  modified_base 15: mod_base = OTHER; note = 2'-O-methylguanosine-3'-phosphate
  modified_base 16: mod_base = OTHER; note = 2'-O-methyladenosine-3'-phosphate
  modified_base 17: mod_base = OTHER; note = 2'-O-methylcytidine-3'-phosphate
  modified_base 18: mod_base = OTHER; note = 2'-O-methylcytidine-3'-phosphate
  modified_base 19: mod_base = OTHER; note = 2'-O-methylguanosine-3'-phosphorothioate
  modified_base 20: mod_base = OTHER; note = 2'-O-methyladenosine-3'-phosphorothioate
  modified_base 21: mod_base = OTHER; note = 2'-O-methyladenosine
cctctcatttctctgaccgaa

SEQ ID NO: 908 - RNA, 21 nt, synthetic construct
  source 1..21: mol_type = other RNA
  modified_base 1: mod_base = OTHER; note = 2'-O-methyluridine-3'-phosphorothioate
  modified_base 2: mod_base = OTHER; note = 2'-O-methylcytidine-3'-phosphorothioate
  modified_base 3: mod_base = OTHER; note = 2'-O-methyluridine-3'-phosphate
  modified_base 4: mod_base = OTHER; note = 2'-O-methylcytidine-3'-phosphate
  modified_base 5: mod_base = OTHER; note = 2'-O-methyladenosine-3'-phosphate
  modified_base 6: mod_base = OTHER; note = 2'-O-hexadecyl-uridine-3'-phosphate
  modified_base 7: mod_base = OTHER; note = 2'-deoxy-2'-fluorouridine-3'-phosphate
  modified_base 8: mod_base = OTHER; note = 2'-O-methyluridine-3'-phosphate
  modified_base 9: mod_base = OTHER; note = 2'-deoxy-2'-fluorocytidine-3'-phosphate
  modified_base 10: mod_base = OTHER; note = 2'-deoxy-2'-fluorouridine-3'-phosphate
  modified_base 11: mod_base = OTHER; note = 2'-deoxy-2'-fluorocytidine-3'-phosphate
  modified_base 12: mod_base = OTHER; note = 2'-O-methyluridine-3'-phosphate
  modified_base 13: mod_base = OTHER; note = 2'-O-methylguanosine-3'-phosphate
  modified_base 14: mod_base = OTHER; note = 2'-O-methyladenosine-3'-phosphate
  modified_base 15: mod_base = OTHER; note = 2'-O-methylcytidine-3'-phosphate
  modified_base 16: mod_base = OTHER; note = 2'-O-methylcytidine-3'-phosphate
  modified_base 17: mod_base = OTHER; note = 2'-O-methylguanosine-3'-phosphate
  modified_base 18: mod_base = OTHER; note = 2'-O-methyladenosine-3'-phosphate
  modified_base 19: mod_base = OTHER; note = 2'-O-methyladenosine-3'-phosphorothioate
  modified_base 20: mod_base = OTHER; note = 2'-O-methylguanosine-3'-phosphorothioate
  modified_base 21: mod_base = OTHER; note = 2'-O-methyladenosine
tctcatttctctgaccgaaga

SEQ ID NO: 909 - RNA, 21 nt, synthetic construct
  source 1..21: mol_type = other RNA
  modified_base 1: mod_base = OTHER; note = 2'-O-methylcytidine-3'-phosphorothioate
  modified_base 2: mod_base = OTHER; note = 2'-O-methyluridine-3'-phosphorothioate
  modified_base 3: mod_base = OTHER; note = 2'-O-methylcytidine-3'-phosphate
  modified_base 4: mod_base = OTHER; note = 2'-O-methyladenosine-3'-phosphate
  modified_base 5: mod_base = OTHER; note = 2'-O-methyluridine-3'-phosphate
  modified_base 6: mod_base = OTHER; note = 2'-O-hexadecyl-uridine-3'-phosphate
  modified_base 7: mod_base = OTHER; note = 2'-deoxy-2'-fluorouridine-3'-phosphate
  modified_base 8: mod_base = OTHER; note = 2'-O-methylcytidine-3'-phosphate
  modified_base 9: mod_base = OTHER; note = 2'-deoxy-2'-fluorouridine-3'-phosphate
  modified_base 10: mod_base = OTHER; note = 2'-deoxy-2'-fluorocytidine-3'-phosphate
  modified_base 11: mod_base = OTHER; note = 2'-deoxy-2'-fluorouridine-3'-phosphate
  modified_base 12: mod_base = OTHER; note = 2'-O-methylguanosine-3'-phosphate
  modified_base 13: mod_base = OTHER; note = 2'-O-methyladenosine-3'-phosphate
  modified_base 14: mod_base = OTHER; note = 2'-O-methylcytidine-3'-phosphate
  modified_base 15: mod_base = OTHER; note = 2'-O-methylcytidine-3'-phosphate
  modified_base 16: mod_base = OTHER; note = 2'-O-methylguanosine-3'-phosphate
  modified_base 17: mod_base = OTHER; note = 2'-O-methyladenosine-3'-phosphate
  modified_base 18: mod_base = OTHER; note = 2'-O-methyladenosine-3'-phosphate
  modified_base 19: mod_base = OTHER; note = 2'-O-methylguanosine-3'-phosphorothioate
  modified_base 20: mod_base = OTHER; note = 2'-O-methylcytidine-3'-phosphorothioate
  modified_base 21: mod_base = OTHER; note = 2'-O-methyladenosine
ctcatttctctgaccgaagca

SEQ ID NO: 910 - RNA, 21 nt, synthetic construct
  source 1..21: mol_type = other RNA
  modified_base 1: mod_base = OTHER; note = 2'-O-methyluridine-3'-phosphorothioate
  modified_base 2: mod_base = OTHER; note = 2'-O-methylcytidine-3'-phosphorothioate
  modified_base 3: mod_base = OTHER; note = 2'-O-methyladenosine-3'-phosphate
  modified_base 4: mod_base = OTHER; note = 2'-O-methyluridine-3'-phosphate
  modified_base 5: mod_base = OTHER; note = 2'-O-methyluridine-3'-phosphate
  modified_base 6: mod_base = OTHER; note = 2'-O-hexadecyl-uridine-3'-phosphate
  modified_base 7: mod_base = OTHER; note = 2'-deoxy-2'-fluorocytidine-3'-phosphate
  modified_base 8: mod_base = OTHER; note = 2'-O-methyluridine-3'-phosphate
  modified_base 9: mod_base = OTHER; note = 2'-deoxy-2'-fluorocytidine-3'-phosphate
  modified_base 10: mod_base = OTHER; note = 2'-deoxy-2'-fluorouridine-3'-phosphate
  modified_base 11: mod_base = OTHER; note = 2'-deoxy-2'-fluoroguanosine-3'-phosphate
  modified_base 12: mod_base = OTHER; note = 2'-O-methyladenosine-3'-phosphate
  modified_base 13: mod_base = OTHER; note = 2'-O-methylcytidine-3'-phosphate
  modified_base 14: mod_base = OTHER; note = 2'-O-methylcytidine-3'-phosphate
  modified_base 15: mod_base = OTHER; note = 2'-O-methylguanosine-3'-phosphate
  modified_base 16: mod_base = OTHER; note = 2'-O-methyladenosine-3'-phosphate
  modified_base 17: mod_base = OTHER; note = 2'-O-methyladenosine-3'-phosphate
  modified_base 18: mod_base = OTHER; note = 2'-O-methylguanosine-3'-phosphate
  modified_base 19: mod_base = OTHER; note = 2'-O-methylcytidine-3'-phosphorothioate
  modified_base 20: mod_base = OTHER; note = 2'-O-methyluridine-3'-phosphorothioate
  modified_base 21: mod_base = OTHER; note = 2'-O-methyladenosine
tcatttctctgaccgaagcta

SEQ ID NO: 911 - RNA, 21 nt, synthetic construct
  source 1..21: mol_type = other RNA
  modified_base 1: mod_base = OTHER; note = 2'-O-methylcytidine-3'-phosphorothioate
  modified_base 2: mod_base = OTHER; note = 2'-O-methyluridine-3'-phosphorothioate
  modified_base 3: mod_base = OTHER; note = 2'-O-methylcytidine-3'-phosphate
  modified_base 4: mod_base = OTHER; note = 2'-O-methyluridine-3'-phosphate
  modified_base 5: mod_base = OTHER; note = 2'-O-methylguanosine-3'-phosphate
  modified_base 6: mod_base = OTHER; note = 2'-O-hexadecyl-adenosine-3'-phosphate
  modified_base 7: mod_base = OTHER; note = 2'-deoxy-2'-fluorocytidine-3'-phosphate
  modified_base 8: mod_base = OTHER; note = 2'-O-methylcytidine-3'-phosphate
  modified_base 9: mod_base = OTHER; note = 2'-deoxy-2'-fluoroguanosine-3'-phosphate
  modified_base 10: mod_base = OTHER; note = 2'-deoxy-2'-fluoroadenosine-3'-phosphate
  modified_base 11: mod_base = OTHER; note = 2'-deoxy-2'-fluoroadenosine-3'-phosphate
  modified_base 12: mod_base = OTHER; note = 2'-O-methylguanosine-3'-phosphate
  modified_base 13: mod_base = OTHER; note = 2'-O-methylcytidine-3'-phosphate
  modified_base 14: mod_base = OTHER; note = 2'-O-methyluridine-3'-phosphate
  modified_base 15: mod_base = OTHER; note = 2'-O-methylguanosine-3'-phosphate
  modified_base 16: mod_base = OTHER; note = 2'-O-methylguanosine-3'-phosphate
  modified_base 17: mod_base = OTHER; note = 2'-O-methylguanosine-3'-phosphate
  modified_base 18: mod_base = OTHER; note = 2'-O-methyluridine-3'-phosphate
  modified_base 19: mod_base = OTHER; note = 2'-O-methylguanosine-3'-phosphorothioate
  modified_base 20: mod_base = OTHER; note = 2'-O-methyluridine-3'-phosphorothioate
  modified_base 21: mod_base = OTHER; note = 2'-O-methyladenosine
ctctgaccgaagctgggtgta

SEQ ID NO: 912 - RNA, 21 nt, synthetic construct
  source 1..21: mol_type = other RNA
  modified_base 1: mod_base = OTHER; note = 2'-O-methylguanosine-3'-phosphorothioate
  modified_base 2: mod_base = OTHER; note = 2'-O-methylguanosine-3'-phosphorothioate
  modified_base 3: mod_base = OTHER; note = 2'-O-methyluridine-3'-phosphate
  modified_base 4: mod_base = OTHER; note = 2'-O-methylguanosine-3'-phosphate
  modified_base 5: mod_base = OTHER; note = 2'-O-methyluridine-3'-phosphate
  modified_base 6: mod_base = OTHER; note = 2'-O-hexadecyl-cytidine-3'-phosphate
  modified_base 7: mod_base = OTHER; note = 2'-deoxy-2'-fluoroguanosine-3'-phosphate
  modified_base 8: mod_base = OTHER; note = 2'-O-methylguanosine-3'-phosphate
  modified_base 9: mod_base = OTHER; note = 2'-deoxy-2'-fluoroguanosine-3'-phosphate
  modified_base 10: mod_base = OTHER; note = 2'-deoxy-2'-fluorocytidine-3'-phosphate
  modified_base 11: mod_base = OTHER; note = 2'-deoxy-2'-fluorouridine-3'-phosphate
  modified_base 12: mod_base = OTHER; note = 2'-O-methyluridine-3'-phosphate
  modified_base 13: mod_base = OTHER; note = 2'-O-methyluridine-3'-phosphate
  modified_base 14: mod_base = OTHER; note = 2'-O-methylcytidine-3'-phosphate
  modified_base 15: mod_base = OTHER; note = 2'-O-methylguanosine-3'-phosphate
  modified_base 16: mod_base = OTHER; note = 2'-O-methylcytidine-3'-phosphate
  modified_base 17: mod_base = OTHER; note = 2'-O-methylcytidine-3'-phosphate
  modified_base 18: mod_base = OTHER; note = 2'-O-methyluridine-3'-phosphate
  modified_base 19: mod_base = OTHER; note = 2'-O-methylcytidine-3'-phosphorothioate
  modified_base 20: mod_base = OTHER; note = 2'-O-methyluridine-3'-phosphorothioate
  modified_base 21: mod_base = OTHER; note = 2'-O-methyladenosine
ggtgtcgggctttcgcctcta

SEQ ID NO: 913 - RNA, 21 nt, synthetic construct
  source 1..21: mol_type = other RNA
  modified_base 1: mod_base = OTHER; note = 2'-O-methyluridine-3'-phosphorothioate
  modified_base 2: mod_base = OTHER; note = 2'-O-methylcytidine-3'-phosphorothioate
  modified_base 3: mod_base = OTHER; note = 2'-O-methylguanosine-3'-phosphate
  modified_base 4: mod_base = OTHER; note = 2'-O-methylguanosine-3'-phosphate
  modified_base 5: mod_base = OTHER; note = 2'-O-methylguanosine-3'-phosphate
  modified_base 6: mod_base = OTHER; note = 2'-O-hexadecyl-cytidine-3'-phosphate
  modified_base 7: mod_base = OTHER; note = 2'-deoxy-2'-fluorouridine-3'-phosphate
  modified_base 8: mod_base = OTHER; note = 2'-O-methyluridine-3'-phosphate
  modified_base 9: mod_base = OTHER; note = 2'-deoxy-2'-fluorouridine-3'-phosphate
  modified_base 10: mod_base = OTHER; note = 2'-deoxy-2'-fluorocytidine-3'-phosphate
  modified_base 11: mod_base = OTHER; note = 2'-deoxy-2'-fluoroguanosine-3'-phosphate
  modified_base 12: mod_base = OTHER; note = 2'-O-methylcytidine-3'-phosphate
  modified_base 13: mod_base = OTHER; note = 2'-O-methylcytidine-3'-phosphate
  modified_base 14: mod_base = OTHER; note = 2'-O-methyluridine-3'-phosphate
  modified_base 15: mod_base = OTHER; note = 2'-O-methylcytidine-3'-phosphate
  modified_base 16: mod_base = OTHER; note = 2'-O-methyluridine-3'-phosphate
  modified_base 17: mod_base = OTHER; note = 2'-O-methyladenosine-3'-phosphate
  modified_base 18: mod_base = OTHER; note = 2'-O-methylguanosine-3'-phosphate
  modified_base 19: mod_base = OTHER; note = 2'-O-methylcytidine-3'-phosphorothioate
  modified_base 20: mod_base = OTHER; note = 2'-O-methylguanosine-3'-phosphorothioate
  modified_base 21: mod_base = OTHER; note = 2'-O-methyladenosine
tcgggctttcgcctctagcga

SEQ ID NO: 914 - RNA, 21 nt, synthetic construct
  source 1..21: mol_type = other RNA
  modified_base 1: mod_base = OTHER; note = 2'-O-methylcytidine-3'-phosphorothioate
  modified_base 2: mod_base = OTHER; note = 2'-O-methyluridine-3'-phosphorothioate
  modified_base 3: mod_base = OTHER; note = 2'-O-methyluridine-3'-phosphate
  modified_base 4: mod_base = OTHER; note = 2'-O-methyluridine-3'-phosphate
  modified_base 5: mod_base = OTHER; note = 2'-O-methylcytidine-3'-phosphate
  modified_base 6: mod_base = OTHER; note = 2'-O-hexadecyl-guanosine-3'-phosphate
  modified_base 7: mod_base = OTHER; note = 2'-deoxy-2'-fluorocytidine-3'-phosphate
  modified_base 8: mod_base = OTHER; note = 2'-O-methylcytidine-3'-phosphate
  modified_base 9: mod_base = OTHER; note = 2'-deoxy-2'-fluorouridine-3'-phosphate
  modified_base 10: mod_base = OTHER; note = 2'-deoxy-2'-fluorocytidine-3'-phosphate
  modified_base 11: mod_base = OTHER; note = 2'-deoxy-2'-fluorouridine-3'-phosphate
  modified_base 12: mod_base = OTHER; note = 2'-O-methyladenosine-3'-phosphate
  modified_base 13: mod_base = OTHER; note = 2'-O-methylguanosine-3'-phosphate
  modified_base 14: mod_base = OTHER; note = 2'-O-methylcytidine-3'-phosphate
  modified_base 15: mod_base = OTHER; note = 2'-O-methylguanosine-3'-phosphate
  modified_base 16: mod_base = OTHER; note = 2'-O-methyladenosine-3'-phosphate
  modified_base 17: mod_base = OTHER; note = 2'-O-methylcytidine-3'-phosphate
  modified_base 18: mod_base = OTHER; note = 2'-O-methyluridine-3'-phosphate
  modified_base 19: mod_base = OTHER; note = 2'-O-methylguanosine-3'-phosphorothioate
  modified_base 20: mod_base = OTHER; note = 2'-O-methylguanosine-3'-phosphorothioate
  modified_base 21: mod_base = OTHER; note = 2'-O-methyladenosine
ctttcgcctctagcgactgga

SEQ ID NO: 915 - RNA, 21 nt, synthetic construct
  source 1..21: mol_type = other RNA
  modified_base 1: mod_base = OTHER; note = 2'-O-methyluridine-3'-phosphorothioate
  modified_base 2: mod_base = OTHER; note = 2'-O-methyluridine-3'-phosphorothioate
  modified_base 3: mod_base = OTHER; note = 2'-O-methylcytidine-3'-phosphate
  modified_base 4: mod_base = OTHER; note = 2'-O-methylguanosine-3'-phosphate
  modified_base 5: mod_base = OTHER; note = 2'-O-methylcytidine-3'-phosphate
  modified_base 6: mod_base = OTHER; note = 2'-O-hexadecyl-cytidine-3'-phosphate
  modified_base 7: mod_base = OTHER; note = 2'-deoxy-2'-fluorouridine-3'-phosphate
  modified_base 8: mod_base = OTHER; note = 2'-O-methylcytidine-3'-phosphate
  modified_base 9: mod_base = OTHER; note = 2'-deoxy-2'-fluorouridine-3'-phosphate
  modified_base 10: mod_base = OTHER; note = 2'-deoxy-2'-fluoroadenosine-3'-phosphate
  modified_base 11: mod_base = OTHER; note = 2'-deoxy-2'-fluoroguanosine-3'-phosphate
  modified_base 12: mod_base = OTHER; note = 2'-O-methylcytidine-3'-phosphate
  modified_base 13: mod_base = OTHER; note = 2'-O-methylguanosine-3'-phosphate
  modified_base 14: mod_base = OTHER; note = 2'-O-methyladenosine-3'-phosphate
  modified_base 15: mod_base = OTHER; note = 2'-O-methylcytidine-3'-phosphate
  modified_base 16: mod_base = OTHER; note = 2'-O-methyluridine-3'-phosphate
  modified_base 17: mod_base = OTHER; note = 2'-O-methylguanosine-3'-phosphate
  modified_base 18: mod_base = OTHER; note = 2'-O-methylguanosine-3'-phosphate
  modified_base 19: mod_base = OTHER; note = 2'-O-methyluridine-3'-phosphorothioate
  modified_base 20: mod_base = OTHER; note = 2'-O-methylguanosine-3'-phosphorothioate
  modified_base 21: mod_base = OTHER; note = 2'-O-methyladenosine
ttcgcctctagcgactggtga

SEQ ID NO: 916 - RNA, 21 nt, synthetic construct
  source 1..21: mol_type = other RNA
  modified_base 1: mod_base = OTHER; note = 2'-O-methyluridine-3'-phosphorothioate
  modified_base 2: mod_base = OTHER; note = 2'-O-methylcytidine-3'-phosphorothioate
  modified_base 3: mod_base = OTHER; note = 2'-O-methylguanosine-3'-phosphate
  modified_base 4: mod_base = OTHER; note = 2'-O-methylcytidine-3'-phosphate
  modified_base 5: mod_base = OTHER; note = 2'-O-methylcytidine-3'-phosphate
  modified_base 6: mod_base = OTHER; note = 2'-O-hexadecyl-uridine-3'-phosphate
  modified_base 7: mod_base = OTHER; note = 2'-deoxy-2'-fluorocytidine-3'-phosphate
  modified_base 8: mod_base = OTHER; note = 2'-O-methyluridine-3'-phosphate
  modified_base 9: mod_base = OTHER; note = 2'-deoxy-2'-fluoroadenosine-3'-phosphate
  modified_base 10: mod_base = OTHER; note = 2'-deoxy-2'-fluoroguanosine-3'-phosphate
  modified_base 11: mod_base = OTHER; note = 2'-deoxy-2'-fluorocytidine-3'-phosphate
  modified_base 12: mod_base = OTHER; note = 2'-O-methylguanosine-3'-phosphate
  modified_base 13: mod_base = OTHER; note = 2'-O-methyladenosine-3'-phosphate
  modified_base 14: mod_base = OTHER; note = 2'-O-methylcytidine-3'-phosphate
  modified_base 15: mod_base = OTHER; note = 2'-O-methyluridine-3'-phosphate
  modified_base 16: mod_base = OTHER; note = 2'-O-methylguanosine-3'-phosphate
  modified_base 17: mod_base = OTHER; note = 2'-O-methylguanosine-3'-phosphate
  modified_base 18: mod_base = OTHER; note = 2'-O-methyluridine-3'-phosphate
  modified_base 19: mod_base = OTHER; note = 2'-O-methylguanosine-3'-phosphorothioate
  modified_base 20: mod_base = OTHER; note = 2'-O-methylguanosine-3'-phosphorothioate
  modified_base 21: mod_base = OTHER; note = 2'-O-methyladenosine
tcgcctctagcgactggtgga

SEQ ID NO: 917 - RNA, 21 nt, synthetic construct
  source 1..21: mol_type = other RNA
  modified_base 1: mod_base = OTHER; note = 2'-O-methylcytidine-3'-phosphorothioate
  modified_base 2: mod_base = OTHER; note = 2'-O-methylguanosine-3'-phosphorothioate
  modified_base 3: mod_base = OTHER; note = 2'-O-methylcytidine-3'-phosphate
  modified_base 4: mod_base = OTHER; note = 2'-O-methylcytidine-3'-phosphate
  modified_base 5: mod_base = OTHER; note = 2'-O-methyluridine-3'-phosphate
  modified_base 6: mod_base = OTHER; note = 2'-O-hexadecyl-cytidine-3'-phosphate
  modified_base 7: mod_base = OTHER; note = 2'-deoxy-2'-fluorouridine-3'-phosphate
  modified_base 8: mod_base = OTHER; note = 2'-O-methyladenosine-3'-phosphate
  modified_base 9: mod_base = OTHER; note = 2'-deoxy-2'-fluoroguanosine-3'-phosphate
  modified_base 10: mod_base = OTHER; note = 2'-deoxy-2'-fluorocytidine-3'-phosphate
  modified_base 11: mod_base = OTHER; note = 2'-deoxy-2'-fluoroguanosine-3'-phosphate
  modified_base 12: mod_base = OTHER; note = 2'-O-methyladenosine-3'-phosphate
  modified_base 13: mod_base = OTHER; note = 2'-O-methylcytidine-3'-phosphate
  modified_base 14: mod_base = OTHER; note = 2'-O-methyluridine-3'-phosphate
  modified_base 15: mod_base = OTHER; note = 2'-O-methylguanosine-3'-phosphate
  modified_base 16: mod_base = OTHER; note = 2'-O-methylguanosine-3'-phosphate
  modified_base 17: mod_base = OTHER; note = 2'-O-methyluridine-3'-phosphate
  modified_base 18: mod_base = OTHER; note = 2'-O-methylguanosine-3'-phosphate
  modified_base 19: mod_base = OTHER; note = 2'-O-methylguanosine-3'-phosphorothioate
  modified_base 20: mod_base = OTHER; note = 2'-O-methyladenosine-3'-phosphorothioate
  modified_base 21: mod_base = OTHER; note = 2'-O-methyladenosine
cgcctctagcgactggtggaa

SEQ ID NO: 918 - RNA, 21 nt, synthetic construct
  source 1..21: mol_type = other RNA
  modified_base 1: mod_base = OTHER; note = 2'-O-methylguanosine-3'-phosphorothioate
  modified_base 2: mod_base = OTHER; note = 2'-O-methylcytidine-3'-phosphorothioate
  modified_base 3: mod_base = OTHER; note = 2'-O-methylcytidine-3'-phosphate
  modified_base 4: mod_base = OTHER; note = 2'-O-methyluridine-3'-phosphate
  modified_base 5: mod_base = OTHER; note = 2'-O-methylcytidine-3'-phosphate
  modified_base 6: mod_base = OTHER; note = 2'-O-hexadecyl-uridine-3'-phosphate
  modified_base 7: mod_base = OTHER; note = 2'-deoxy-2'-fluoroadenosine-3'-phosphate
  modified_base 8: mod_base = OTHER; note = 2'-O-methylguanosine-3'-phosphate
  modified_base 9: mod_base = OTHER; note = 2'-deoxy-2'-fluorocytidine-3'-phosphate
  modified_base 10: mod_base = OTHER; note = 2'-deoxy-2'-fluoroguanosine-3'-phosphate
  modified_base 11: mod_base = OTHER; note = 2'-deoxy-2'-fluoroadenosine-3'-phosphate
  modified_base 12: mod_base = OTHER; note = 2'-O-methylcytidine-3'-phosphate
  modified_base 13: mod_base = OTHER; note = 2'-O-methyluridine-3'-phosphate
  modified_base 14: mod_base = OTHER; note = 2'-O-methylguanosine-3'-phosphate
  modified_base 15: mod_base = OTHER; note = 2'-O-methylguanosine-3'-phosphate
  modified_base 16: mod_base = OTHER; note = 2'-O-methyluridine-3'-phosphate
  modified_base 17: mod_base = OTHER; note = 2'-O-methylguanosine-3'-phosphate
  modified_base 18: mod_base = OTHER; note = 2'-O-methylguanosine-3'-phosphate
  modified_base 19: mod_base = OTHER; note = 2'-O-methyladenosine-3'-phosphorothioate
  modified_base 20: mod_base = OTHER; note = 2'-O-methyladenosine-3'-phosphorothioate
  modified_base 21: mod_base = OTHER; note = 2'-O-methyladenosine
gcctctagcgactggtggaaa

SEQ ID NO: 919 - RNA, 21 nt, synthetic construct
  source 1..21: mol_type = other RNA
  modified_base 1: mod_base = OTHER; note = 2'-O-methylcytidine-3'-phosphorothioate
  modified_base 2: mod_base = OTHER; note = 2'-O-methyluridine-3'-phosphorothioate
  modified_base 3: mod_base = OTHER; note = 2'-O-methylcytidine-3'-phosphate
  modified_base 4: mod_base = OTHER; note = 2'-O-methyluridine-3'-phosphate
  modified_base 5: mod_base = OTHER; note = 2'-O-methyladenosine-3'-phosphate
  modified_base 6: mod_base = OTHER; note = 2'-O-hexadecyl-guanosine-3'-phosphate
  modified_base 7: mod_base = OTHER; note = 2'-deoxy-2'-fluorocytidine-3'-phosphate
  modified_base 8: mod_base = OTHER; note = 2'-O-methylguanosine-3'-phosphate
  modified_base 9: mod_base = OTHER; note = 2'-deoxy-2'-fluoroadenosine-3'-phosphate
  modified_base 10: mod_base = OTHER; note = 2'-deoxy-2'-fluorocytidine-3'-phosphate
  modified_base 11: mod_base = OTHER; note = 2'-deoxy-2'-fluorouridine-3'-phosphate
  modified_base 12: mod_base = OTHER; note = 2'-O-methylguanosine-3'-phosphate
  modified_base 13: mod_base = OTHER; note = 2'-O-methylguanosine-3'-phosphate
  modified_base 14: mod_base = OTHER; note = 2'-O-methyluridine-3'-phosphate
  modified_base 15: mod_base = OTHER; note = 2'-O-methylguanosine-3'-phosphate
  modified_base 16: mod_base = OTHER; note = 2'-O-methylguanosine-3'-phosphate
  modified_base 17: mod_base = OTHER; note = 2'-O-methyladenosine-3'-phosphate
  modified_base 18: mod_base = OTHER; note = 2'-O-methyladenosine-3'-phosphate
  modified_base 19: mod_base = OTHER; note = 2'-O-methyluridine-3'-phosphorothioate
  modified_base 20: mod_base = OTHER; note = 2'-O-methyluridine-3'-phosphorothioate
  modified_base 21: mod_base = OTHER; note = 2'-O-methyladenosine
ctctagcgactggtggaatta

SEQ ID NO: 920 - RNA, 21 nt, synthetic construct
  source 1..21: mol_type = other RNA
  modified_base 1: mod_base = OTHER; note = 2'-O-methyluridine-3'-phosphorothioate
  modified_base 2: mod_base = OTHER; note = 2'-O-methylcytidine-3'-phosphorothioate
  modified_base 3: mod_base = OTHER; note = 2'-O-methyluridine-3'-phosphate
  modified_base 4: mod_base = OTHER; note = 2'-O-methyladenosine-3'-phosphate
  modified_base 5: mod_base = OTHER; note = 2'-O-methylguanosine-3'-phosphate
  modified_base 6: mod_base = OTHER; note = 2'-O-hexadecyl-cytidine-3'-phosphate
  modified_base 7: mod_base = OTHER; note = 2'-deoxy-2'-fluoroguanosine-3'-phosphate
  modified_base 8: mod_base = OTHER; note = 2'-O-methyladenosine-3'-phosphate
  modified_base 9: mod_base = OTHER; note = 2'-deoxy-2'-fluorocytidine-3'-phosphate
  modified_base 10: mod_base = OTHER; note = 2'-deoxy-2'-fluorouridine-3'-phosphate
  modified_base 11: mod_base = OTHER; note = 2'-deoxy-2'-fluoroguanosine-3'-phosphate
  modified_base 12: mod_base = OTHER; note = 2'-O-methylguanosine-3'-phosphate
  modified_base 13: mod_base = OTHER; note = 2'-O-methyluridine-3'-phosphate
  modified_base 14: mod_base = OTHER; note = 2'-O-methylguanosine-3'-phosphate
  modified_base 15: mod_base = OTHER; note = 2'-O-methylguanosine-3'-phosphate
  modified_base 16: mod_base = OTHER; note = 2'-O-methyladenosine-3'-phosphate
  modified_base 17: mod_base = OTHER; note = 2'-O-methyladenosine-3'-phosphate
  modified_base 18: mod_base = OTHER; note = 2'-O-methyluridine-3'-phosphate
  modified_base 19: mod_base = OTHER; note = 2'-O-methyluridine-3'-phosphorothioate
  modified_base 20: mod_base = OTHER; note = 2'-O-methylguanosine-3'-phosphorothioate
  modified_base 21: mod_base = OTHER; note = 2'-O-methyladenosine
tctagcgactggtggaattga

SEQ ID NO: 921 - RNA, 21 nt, synthetic construct
  source 1..21: mol_type = other RNA
  modified_base 1: mod_base = OTHER; note = 2'-O-methylguanosine-3'-phosphorothioate
  modified_base 2: mod_base = OTHER; note = 2'-O-methyladenosine-3'-phosphorothioate
  modified_base 3: mod_base = OTHER; note = 2'-O-methylcytidine-3'-phosphate
  modified_base 4: mod_base = OTHER; note = 2'-O-methyluridine-3'-phosphate
  modified_base 5: mod_base = OTHER; note = 2'-O-methylguanosine-3'-phosphate
  modified_base 6: mod_base = OTHER; note = 2'-O-hexadecyl-guanosine-3'-phosphate
  modified_base 7: mod_base = OTHER; note = 2'-deoxy-2'-fluorouridine-3'-phosphate
  modified_base 8: mod_base = OTHER; note = 2'-O-methylguanosine-3'-phosphate
  modified_base 9: mod_base = OTHER; note = 2'-deoxy-2'-fluoroguanosine-3'-phosphate
  modified_base 10: mod_base = OTHER; note = 2'-deoxy-2'-fluoroadenosine-3'-phosphate
  modified_base 11: mod_base = OTHER; note = 2'-deoxy-2'-fluoroadenosine-3'-phosphate
  modified_base 12: mod_base = OTHER; note = 2'-O-methyluridine-3'-phosphate
  modified_base 13: mod_base = OTHER; note = 2'-O-methyluridine-3'-phosphate
  modified_base 14: mod_base = OTHER; note = 2'-O-methylguanosine-3'-phosphate
  modified_base 15: mod_base = OTHER; note = 2'-O-methylcytidine-3'-phosphate
  modified_base 16: mod_base = OTHER; note = 2'-O-methylcytidine-3'-phosphate
  modified_base 17: mod_base = OTHER; note = 2'-O-methyluridine-3'-phosphate
  modified_base 18: mod_base = OTHER; note = 2'-O-methylguanosine-3'-phosphate
  modified_base 19: mod_base = OTHER; note = 2'-O-methylcytidine-3'-phosphorothioate
  modified_base 20: mod_base = OTHER; note = 2'-O-methyladenosine-3'-phosphorothioate
  modified_base 21: mod_base = OTHER; note = 2'-O-methyladenosine
gactggtggaattgcctgcaa

SEQ ID NO: 922 - RNA, 21 nt, synthetic construct
  source 1..21: mol_type = other RNA
  modified_base 1: mod_base = OTHER; note = 2'-O-methyladenosine-3'-phosphorothioate
  modified_base 2: mod_base = OTHER; note = 2'-O-methylcytidine-3'-phosphorothioate
  modified_base 3: mod_base = OTHER; note = 2'-O-methyluridine-3'-phosphate
  modified_base 4: mod_base = OTHER; note = 2'-O-methylguanosine-3'-phosphate
  modified_base 5: mod_base = OTHER; note = 2'-O-methylguanosine-3'-phosphate
  modified_base 6: mod_base = OTHER; note = 2'-O-hexadecyl-uridine-3'-phosphate
  modified_base 7: mod_base = OTHER; note = 2'-deoxy-2'-fluoroguanosine-3'-phosphate
  modified_base 8: mod_base = OTHER; note = 2'-O-methylguanosine-3'-phosphate
  modified_base 9: mod_base = OTHER; note = 2'-deoxy-2'-fluoroadenosine-3'-phosphate
  modified_base 10: mod_base = OTHER; note = 2'-deoxy-2'-fluoroadenosine-3'-phosphate
  modified_base 11: mod_base = OTHER; note = 2'-deoxy-2'-fluorouridine-3'-phosphate
  modified_base 12: mod_base = OTHER; note = 2'-O-methyluridine-3'-phosphate
  modified_base 13: mod_base = OTHER; note = 2'-O-methylguanosine-3'-phosphate
  modified_base 14: mod_base = OTHER; note = 2'-O-methylcytidine-3'-phosphate
  modified_base 15: mod_base = OTHER; note = 2'-O-methylcytidine-3'-phosphate
  modified_base 16: mod_base = OTHER; note = 2'-O-methyluridine-3'-phosphate
  modified_base 17: mod_base = OTHER; note = 2'-O-methylguanosine-3'-phosphate
  modified_base 18: mod_base = OTHER; note = 2'-O-methylcytidine-3'-phosphate
  modified_base 19: mod_base = OTHER; note = 2'-O-methyladenosine-3'-phosphorothioate
  modified_base 20: mod_base = OTHER; note = 2'-O-methyluridine-3'-phosphorothioate
  modified_base 21: mod_base = OTHER; note = 2'-O-methyladenosine
actggtggaattgcctgcata

SEQ ID NO: 923 - RNA, 21 nt, synthetic construct
  source 1..21: mol_type = other RNA
  modified_base 1: mod_base = OTHER; note = 2'-O-methyluridine-3'-phosphorothioate
  modified_base 2: mod_base = OTHER; note = 2'-O-methylguanosine-3'-phosphorothioate
  modified_base 3: mod_base = OTHER; note = 2'-O-methylguanosine-3'-phosphate
  modified_base 4: mod_base = OTHER; note = 2'-O-methyluridine-3'-phosphate
  modified_base 5: mod_base = OTHER; note = 2'-O-methylguanosine-3'-phosphate
  modified_base 6: mod_base = OTHER; note = 2'-O-hexadecyl-guanosine-3'-phosphate
  modified_base 7: mod_base = OTHER; note = 2'-deoxy-2'-fluoroadenosine-3'-phosphate
  modified_base 8: mod_base = OTHER; note = 2'-O-methyladenosine-3'-phosphate
  modified_base 9: mod_base = OTHER; note = 2'-deoxy-2'-fluorouridine-3'-phosphate
  modified_base 10: mod_base = OTHER; note = 2'-deoxy-2'-fluorouridine-3'-phosphate
  modified_base 11: mod_base = OTHER; note = 2'-deoxy-2'-fluoroguanosine-3'-phosphate
  modified_base 12: mod_base = OTHER; note = 2'-O-methylcytidine-3'-phosphate
  modified_base 13: mod_base = OTHER; note = 2'-O-methylcytidine-3'-phosphate
  modified_base 14: mod_base = OTHER; note = 2'-O-methyluridine-3'-phosphate
  modified_base 15: mod_base = OTHER; note = 2'-O-methylguanosine-3'-phosphate
  modified_base 16: mod_base = OTHER; note = 2'-O-methylcytidine-3'-phosphate
  modified_base 17: mod_base = OTHER; note = 2'-O-methyladenosine-3'-phosphate
  modified_base 18: mod_base = OTHER; note = 2'-O-methyluridine-3'-phosphate
  modified_base 19: mod_base = OTHER; note = 2'-O-methylcytidine-3'-phosphorothioate
  modified_base 20: mod_base = OTHER; note = 2'-O-methylcytidine-3'-phosphorothioate
  modified_base 21: mod_base = OTHER; note = 2'-O-methyladenosine
tggtggaattgcctgcatcca

SEQ ID NO: 924 - RNA, 21 nt, synthetic construct
  source 1..21: mol_type = other RNA
  modified_base 1: mod_base = OTHER; note = 2'-O-methyluridine-3'-phosphorothioate
  modified_base 2: mod_base = OTHER; note = 2'-O-methylcytidine-3'-phosphorothioate
  modified_base 3: mod_base = OTHER; note = 2'-O-methyluridine-3'-phosphate
  modified_base 4: mod_base = OTHER; note = 2'-O-methylguanosine-3'-phosphate
  modified_base 5: mod_base = OTHER; note = 2'-O-methylguanosine-3'-phosphate
  modified_base 6: mod_base = OTHER; note = 2'-O-hexadecyl-cytidine-3'-phosphate
  modified_base 7: mod_base = OTHER; note = 2'-deoxy-2'-fluorocytidine-3'-phosphate
  modified_base 8: mod_base = OTHER; note = 2'-O-methyluridine-3'-phosphate
  modified_base 9: mod_base = OTHER; note = 2'-deoxy-2'-fluorocytidine-3'-phosphate
  modified_base 10: mod_base = OTHER; note = 2'-deoxy-2'-fluorouridine-3'-phosphate
  modified_base 11: mod_base = OTHER; note = 2'-deoxy-2'-fluorouridine-3'-phosphate
  modified_base 12: mod_base = OTHER; note = 2'-O-methylcytidine-3'-phosphate
  modified_base 13: mod_base = OTHER; note = 2'-O-methylcytidine-3'-phosphate
  modified_base 14: mod_base = OTHER; note = 2'-O-methyluridine-3'-phosphate
  modified_base 15: mod_base = OTHER; note = 2'-O-methyluridine-3'-phosphate
  modified_base 16: mod_base = OTHER; note = 2'-O-methylguanosine-3'-phosphate
  modified_base 17: mod_base = OTHER; note = 2'-O-methylcytidine-3'-phosphate
  modified_base 18: mod_base = OTHER; note = 2'-O-methyluridine-3'-phosphate
  modified_base 19: mod_base = OTHER; note = 2'-O-methyluridine-3'-phosphorothioate
  modified_base 20: mod_base = OTHER; note = 2'-O-methyluridine-3'-phosphorothioate
  modified_base 21: mod_base = OTHER; note = 2'-O-methyladenosine
tctggcctcttccttgcttta

SEQ ID NO: 925 - RNA, 21 nt, synthetic construct
  source 1..21: mol_type = other RNA
  modified_base 1: mod_base = OTHER; note = 2'-O-methylcytidine-3'-phosphorothioate
  modified_base 2: mod_base = OTHER; note = 2'-O-methyluridine-3'-phosphorothioate
  modified_base 3: mod_base = OTHER; note = 2'-O-methylguanosine-3'-phosphate
  modified_base 4: mod_base = OTHER; note = 2'-O-methylguanosine-3'-phosphate
  modified_base 5: mod_base = OTHER; note = 2'-O-methylcytidine-3'-phosphate
  modified_base 6: mod_base = OTHER; note = 2'-O-hexadecyl-cytidine-3'-phosphate
  modified_base 7: mod_base = OTHER; note = 2'-deoxy-2'-fluorouridine-3'-phosphate
  modified_base 8: mod_base = OTHER; note = 2'-O-methylcytidine-3'-phosphate
  modified_base 9: mod_base = OTHER; note = 2'-deoxy-2'-fluorouridine-3'-phosphate
  modified_base 10: mod_base = OTHER; note = 2'-deoxy-2'-fluorouridine-3'-phosphate
  modified_base 11: mod_base = OTHER; note = 2'-deoxy-2'-fluorocytidine-3'-phosphate
  modified_base 12: mod_base = OTHER; note = 2'-O-methylcytidine-3'-phosphate
  modified_base 13: mod_base = OTHER; note = 2'-O-methyluridine-3'-phosphate
  modified_base 14: mod_base = OTHER; note = 2'-O-methyluridine-3'-phosphate
  modified_base 15: mod_base = OTHER; note = 2'-O-methylguanosine-3'-phosphate
  modified_base 16: mod_base = OTHER; note = 2'-O-methylcytidine-3'-phosphate
  modified_base 17: mod_base = OTHER; note = 2'-O-methyluridine-3'-phosphate
  modified_base 18: mod_base = OTHER; note = 2'-O-methyluridine-3'-phosphate
  modified_base 19: mod_base = OTHER; note = 2'-O-methyluridine-3'-phosphorothioate
  modified_base 20: mod_base = OTHER; note = 2'-O-methylcytidine-3'-phosphorothioate
  modified_base 21: mod_base = OTHER; note = 2'-O-methyladenosine
ctggcctcttccttgctttca

SEQ ID NO: 926 - RNA, 21 nt, synthetic construct
  source 1..21: mol_type = other RNA
  modified_base 1: mod_base = OTHER; note = 2'-O-methyluridine-3'-phosphorothioate
  modified_base 2: mod_base = OTHER; note = 2'-O-methylguanosine-3'-phosphorothioate
  modified_base 3: mod_base = OTHER; note = 2'-O-methylguanosine-3'-phosphate
  modified_base 4: mod_base = OTHER; note = 2'-O-methylcytidine-3'-phosphate
  modified_base 5: mod_base = OTHER; note = 2'-O-methylcytidine-3'-phosphate
  modified_base 6: mod_base = OTHER; note = 2'-O-hexadecyl-uridine-3'-phosphate
  modified_base 7: mod_base = OTHER; note = 2'-deoxy-2'-fluorocytidine-3'-phosphate
  modified_base 8: mod_base = OTHER; note = 2'-O-methyluridine-3'-phosphate
  modified_base 9: mod_base = OTHER; note = 2'-deoxy-2'-fluorouridine-3'-phosphate
  modified_base 10: mod_base = OTHER; note = 2'-deoxy-2'-fluorocytidine-3'-phosphate
  modified_base 11: mod_base = OTHER; note = 2'-deoxy-2'-fluorocytidine-3'-phosphate
  modified_base 12: mod_base = OTHER; note = 2'-O-methyluridine-3'-phosphate
  modified_base 13: mod_base = OTHER; note = 2'-O-methyluridine-3'-phosphate
  modified_base 14: mod_base = OTHER; note = 2'-O-methylguanosine-3'-phosphate
  modified_base 15: mod_base = OTHER; note = 2'-O-methylcytidine-3'-phosphate
  modified_base 16: mod_base = OTHER; note = 2'-O-methyluridine-3'-phosphate
  modified_base 17: mod_base = OTHER; note = 2'-O-methyluridine-3'-phosphate
  modified_base 18: mod_base = OTHER; note = 2'-O-methyluridine-3'-phosphate
  modified_base 19: mod_base = OTHER; note = 2'-O-methylcytidine-3'-phosphorothioate
  modified_base 20: mod_base = OTHER; note = 2'-O-methylcytidine-3'-phosphorothioate
  modified_base 21: mod_base = OTHER; note = 2'-O-methyladenosine
tggcctcttccttgctttcca

SEQ ID NO: 927 - RNA, 21 nt, synthetic construct
  source 1..21: mol_type = other RNA
  modified_base 1: mod_base = OTHER; note = 2'-O-methylguanosine-3'-phosphorothioate
  modified_base 2: mod_base = OTHER; note = 2'-O-methylguanosine-3'-phosphorothioate
  modified_base 3: mod_base = OTHER; note = 2'-O-methylcytidine-3'-phosphate
  modified_base 4: mod_base = OTHER; note = 2'-O-methylcytidine-3'-phosphate
  modified_base 5: mod_base = OTHER; note = 2'-O-methyluridine-3'-phosphate
  modified_base 6: mod_base = OTHER; note = 2'-O-hexadecyl-cytidine-3'-phosphate
  modified_base 7: mod_base = OTHER; note = 2'-deoxy-2'-fluorouridine-3'-phosphate
  modified_base 8: mod_base = OTHER; note = 2'-O-methyluridine-3'-phosphate
  modified_base 9: mod_base = OTHER; note = 2'-deoxy-2'-fluorocytidine-3'-phosphate
  modified_base 10: mod_base = OTHER; note = 2'-deoxy-2'-fluorocytidine-3'-phosphate
  modified_base 11: mod_base = OTHER; note = 2'-deoxy-2'-fluorouridine-3'-phosphate
  modified_base 12: mod_base = OTHER; note = 2'-O-methyluridine-3'-phosphate
  modified_base 13: mod_base = OTHER; note = 2'-O-methylguanosine-3'-phosphate
  modified_base 14: mod_base = OTHER; note = 2'-O-methylcytidine-3'-phosphate
  modified_base 15: mod_base = OTHER; note = 2'-O-methyluridine-3'-phosphate
  modified_base 16: mod_base = OTHER; note = 2'-O-methyluridine-3'-phosphate
  modified_base 17: mod_base = OTHER; note = 2'-O-methyluridine-3'-phosphate
  modified_base 18: mod_base = OTHER; note = 2'-O-methylcytidine-3'-phosphate
  modified_base 19: mod_base = OTHER; note = 2'-O-methylcytidine-3'-phosphorothioate
  modified_base 20: mod_base = OTHER; note = 2'-O-methylcytidine-3'-phosphorothioate
  modified_base 21: mod_base = OTHER; note = 2'-O-methyladenosine
ggcctcttccttgctttccca

SEQ ID NO: 928 - RNA, 21 nt, synthetic construct
  source 1..21: mol_type = other RNA
  modified_base 1: mod_base = OTHER; note = 2'-O-methylguanosine-3'-phosphorothioate
  modified_base 2: mod_base = OTHER; note = 2'-O-methylcytidine-3'-phosphorothioate
  modified_base 3: mod_base = OTHER; note = 2'-O-methylcytidine-3'-phosphate
  modified_base 4: mod_base = OTHER; note = 2'-O-methyluridine-3'-phosphate
  modified_base 5: mod_base = OTHER; note = 2'-O-methylcytidine-3'-phosphate
  modified_base 6: mod_base = OTHER; note = 2'-O-hexadecyl-uridine-3'-phosphate
  modified_base 7: mod_base = OTHER; note = 2'-deoxy-2'-fluorouridine-3'-phosphate
  modified_base 8: mod_base = OTHER; note = 2'-O-methylcytidine-3'-phosphate
  modified_base 9: mod_base = OTHER; note = 2'-deoxy-2'-fluorocytidine-3'-phosphate
  modified_base 10: mod_base = OTHER; note = 2'-deoxy-2'-fluorouridine-3'-phosphate
  modified_base 11: mod_base = OTHER; note = 2'-deoxy-2'-fluorouridine-3'-phosphate
  modified_base 12: mod_base = OTHER; note = 2'-O-methylguanosine-3'-phosphate
  modified_base 13: mod_base = OTHER; note = 2'-O-methylcytidine-3'-phosphate
  modified_base 14: mod_base = OTHER; note = 2'-O-methyluridine-3'-phosphate
  modified_base 15: mod_base = OTHER; note = 2'-O-methyluridine-3'-phosphate
  modified_base 16: mod_base = OTHER; note = 2'-O-methyluridine-3'-phosphate
  modified_base 17: mod_base = OTHER; note = 2'-O-methylcytidine-3'-phosphate
  modified_base 18: mod_base = OTHER; note = 2'-O-methylcytidine-3'-phosphate
  modified_base 19: mod_base = OTHER; note = 2'-O-methylcytidine-3'-phosphorothioate
  modified_base 20: mod_base = OTHER; note = 2'-O-methylguanosine-3'-phosphorothioate
  modified_base 21: mod_base = OTHER; note = 2'-O-methyladenosine
gcctcttccttgctttcccga

SEQ ID NO: 929 - RNA, 21 nt, synthetic construct
  source 1..21: mol_type = other RNA
  modified_base 1: mod_base = OTHER; note = 2'-O-methyluridine-3'-phosphorothioate
  modified_base 2: mod_base = OTHER; note = 2'-O-methyluridine-3'-phosphorothioate
  modified_base 3: mod_base = OTHER; note = 2'-O-methylcytidine-3'-phosphate
  modified_base 4: mod_base = OTHER; note = 2'-O-methylcytidine-3'-phosphate
  modified_base 5: mod_base = OTHER; note = 2'-O-methyluridine-3'-phosphate
  modified_base 6: mod_base = OTHER; note = 2'-O-hexadecyl-uridine-3'-phosphate
  modified_base 7: mod_base = OTHER; note = 2'-deoxy-2'-fluoroguanosine-3'-phosphate
  modified_base 8: mod_base = OTHER; note = 2'-O-methylcytidine-3'-phosphate
  modified_base 9: mod_base = OTHER; note = 2'-deoxy-2'-fluorouridine-3'-phosphate
  modified_base 10: mod_base = OTHER; note = 2'-deoxy-2'-fluorouridine-3'-phosphate
  modified_base 11: mod_base = OTHER; note = 2'-deoxy-2'-fluorouridine-3'-phosphate
  modified_base 12: mod_base = OTHER; note = 2'-O-methylcytidine-3'-phosphate
  modified_base 13: mod_base = OTHER; note = 2'-O-methylcytidine-3'-phosphate
  modified_base 14: mod_base = OTHER; note = 2'-O-methylcytidine-3'-phosphate
  modified_base 15: mod_base = OTHER; note = 2'-O-methylguanosine-3'-phosphate
  modified_base 16: mod_base = OTHER; note = 2'-O-methylcytidine-3'-phosphate
  modified_base 17: mod_base = OTHER; note = 2'-O-methylcytidine-3'-phosphate
  modified_base 18: mod_base = OTHER; note = 2'-O-methylcytidine-3'-phosphate
  modified_base 19: mod_base = OTHER; note = 2'-O-methyluridine-3'-phosphorothioate
  modified_base 20: mod_base = OTHER; note = 2'-O-methylcytidine-3'-phosphorothioate
  modified_base 21: mod_base = OTHER; note = 2'-O-methyladenosine
ttccttgctttcccgccctca

SEQ ID NO: 930 - RNA, 21 nt, synthetic construct
  source 1..21: mol_type = other RNA
  modified_base 1: mod_base = OTHER; note = 2'-O-methyluridine-3'-phosphorothioate
  modified_base 2: mod_base = OTHER; note = 2'-O-methylcytidine-3'-phosphorothioate
  modified_base 3: mod_base = OTHER; note = 2'-O-methylcytidine-3'-phosphate
  modified_base 4: mod_base = OTHER; note = 2'-O-methyluridine-3'-phosphate
  modified_base 5: mod_base = OTHER; note = 2'-O-methyluridine-3'-phosphate
  modified_base 6: mod_base = OTHER; note = 2'-O-hexadecyl-guanosine-3'-phosphate
  modified_base 7: mod_base = OTHER; note = 2'-deoxy-2'-fluorocytidine-3'-phosphate
  modified_base 8: mod_base = OTHER; note = 2'-O-methyluridine-3'-phosphate
  modified_base 9: mod_base = OTHER; note = 2'-deoxy-2'-fluorouridine-3'-phosphate
  modified_base 10: mod_base = OTHER; note = 2'-deoxy-2'-fluorouridine-3'-phosphate
  modified_base 11: mod_base = OTHER; note = 2'-deoxy-2'-fluorocytidine-3'-phosphate
  modified_base 12: mod_base = OTHER; note = 2'-O-methylcytidine-3'-phosphate
  modified_base 13: mod_base = OTHER; note = 2'-O-methylcytidine-3'-phosphate
  modified_base 14: mod_base = OTHER; note = 2'-O-methylguanosine-3'-phosphate
  modified_base 15: mod_base = OTHER; note = 2'-O-methylcytidine-3'-phosphate
  modified_base 16: mod_base = OTHER; note = 2'-O-methylcytidine-3'-phosphate
  modified_base 17: mod_base = OTHER; note = 2'-O-methylcytidine-3'-phosphate
  modified_base 18: mod_base = OTHER; note = 2'-O-methyluridine-3'-phosphate
  modified_base 19: mod_base = OTHER; note = 2'-O-methylcytidine-3'-phosphorothioate
  modified_base 20: mod_base = OTHER; note = 2'-O-methyladenosine-3'-phosphorothioate
  modified_base 21: mod_base = OTHER; note = 2'-O-methyladenosine
tccttgctttcccgccctcaa

SEQ ID NO: 931 - RNA, 21 nt, synthetic construct
  source 1..21: mol_type = other RNA
  modified_base 1: mod_base = OTHER; note = 2'-O-methylcytidine-3'-phosphorothioate
  modified_base 2: mod_base = OTHER; note = 2'-O-methylcytidine-3'-phosphorothioate
  modified_base 3: mod_base = OTHER; note = 2'-O-methyluridine-3'-phosphate
  modified_base 4: mod_base = OTHER; note = 2'-O-methyluridine-3'-phosphate
  modified_base 5: mod_base = OTHER; note = 2'-O-methylguanosine-3'-phosphate
  modified_base 6: mod_base = OTHER; note = 2'-O-hexadecyl-cytidine-3'-phosphate
  modified_base 7: mod_base = OTHER; note = 2'-deoxy-2'-fluorouridine-3'-phosphate
  modified_base 8: mod_base = OTHER; note = 2'-O-methyluridine-3'-phosphate
  modified_base 9: mod_base = OTHER; note = 2'-deoxy-2'-fluorouridine-3'-phosphate
  modified_base 10: mod_base = OTHER; note = 2'-deoxy-2'-fluorocytidine-3'-phosphate
  modified_base 11: mod_base = OTHER; note = 2'-deoxy-2'-fluorocytidine-3'-phosphate
  modified_base 12: mod_base = OTHER; note = 2'-O-methylcytidine-3'-phosphate
  modified_base 13: mod_base = OTHER; note = 2'-O-methylguanosine-3'-phosphate
  modified_base 14: mod_base = OTHER; note = 2'-O-methylcytidine-3'-phosphate
  modified_base 15: mod_base = OTHER; note = 2'-O-methylcytidine-3'-phosphate
  modified_base 16: mod_base = OTHER; note = 2'-O-methylcytidine-3'-phosphate
  modified_base 17: mod_base = OTHER; note = 2'-O-methyluridine-3'-phosphate
  modified_base 18: mod_base = OTHER; note = 2'-O-methylcytidine-3'-phosphate
  modified_base 19: mod_base = OTHER; note = 2'-O-methyladenosine-3'-phosphorothioate
  modified_base 20: mod_base = OTHER; note = 2'-O-methylguanosine-3'-phosphorothioate
  modified_base 21: mod_base = OTHER; note = 2'-O-methyladenosine
ccttgctttcccgccctcaga

SEQ ID NO: 932 - RNA, 21 nt, synthetic construct
  source 1..21: mol_type = other RNA
  modified_base 1: mod_base = OTHER; note = 2'-O-methylcytidine-3'-phosphorothioate
  modified_base 2: mod_base = OTHER; note = 2'-O-methyluridine-3'-phosphorothioate
  modified_base 3: mod_base = OTHER; note = 2'-O-methyluridine-3'-phosphate
  modified_base 4: mod_base = OTHER; note = 2'-O-methylguanosine-3'-phosphate
  modified_base 5: mod_base = OTHER; note = 2'-O-methylcytidine-3'-phosphate
  modified_base 6: mod_base = OTHER; note = 2'-O-hexadecyl-uridine-3'-phosphate
  modified_base 7: mod_base = OTHER; note = 2'-deoxy-2'-fluorouridine-3'-phosphate
  modified_base 8: mod_base = OTHER; note = 2'-O-methyluridine-3'-phosphate
  modified_base 9: mod_base = OTHER; note = 2'-deoxy-2'-fluorocytidine-3'-phosphate
  modified_base 10: mod_base = OTHER; note = 2'-deoxy-2'-fluorocytidine-3'-phosphate
  modified_base 11: mod_base = OTHER; note = 2'-deoxy-2'-fluorocytidine-3'-phosphate
  modified_base 12: mod_base = OTHER; note = 2'-O-methylguanosine-3'-phosphate
  modified_base 13: mod_base = OTHER; note = 2'-O-methylcytidine-3'-phosphate
  modified_base 14: mod_base = OTHER; note = 2'-O-methylcytidine-3'-phosphate
  modified_base 15: mod_base = OTHER; note = 2'-O-methylcytidine-3'-phosphate
  modified_base 16: mod_base = OTHER; note = 2'-O-methyluridine-3'-phosphate
  modified_base 17: mod_base = OTHER; note = 2'-O-methylcytidine-3'-phosphate
  modified_base 18: mod_base = OTHER; note = 2'-O-methyladenosine-3'-phosphate
  modified_base 19: mod_base = OTHER; note = 2'-O-methylguanosine-3'-phosphorothioate
  modified_base 20: mod_base = OTHER; note = 2'-O-methyluridine-3'-phosphorothioate
  modified_base 21: mod_base = OTHER; note = 2'-O-methyladenosine
cttgctttcccgccctcagta

SEQ ID NO: 933 - RNA, 21 nt, synthetic construct
  source 1..21: mol_type = other RNA
  modified_base 1: mod_base = OTHER; note = 2'-O-methyladenosine-3'-phosphorothioate
  modified_base 2: mod_base = OTHER; note = 2'-O-methylguanosine-3'-phosphorothioate
  modified_base 3: mod_base = OTHER; note = 2'-O-methyluridine-3'-phosphate
  modified_base 4: mod_base = OTHER; note = 2'-O-methyladenosine-3'-phosphate
  modified_base 5: mod_base = OTHER; note = 2'-O-methylcytidine-3'-phosphate
  modified_base 6: mod_base = OTHER; note = 2'-O-hexadecyl-cytidine-3'-phosphate
  modified_base 7: mod_base = OTHER; note = 2'-deoxy-2'-fluorocytidine-3'-phosphate
  modified_base 8: mod_base = OTHER; note = 2'-O-methylguanosine-3'-phosphate
  modified_base 9: mod_base = OTHER; note = 2'-deoxy-2'-fluoroadenosine-3'-phosphate
  modified_base 10: mod_base = OTHER; note = 2'-deoxy-2'-fluoroguanosine-3'-phosphate
  modified_base 11: mod_base = OTHER; note = 2'-deoxy-2'-fluorocytidine-3'-phosphate
  modified_base 12: mod_base = OTHER; note = 2'-O-methyluridine-3'-phosphate
  modified_base 13: mod_base = OTHER; note = 2'-O-methylguanosine-3'-phosphate
  modified_base 14: mod_base = OTHER; note = 2'-O-methyluridine-3'-phosphate
  modified_base 15: mod_base = OTHER; note = 2'-O-methylcytidine-3'-phosphate
  modified_base 16: mod_base = OTHER; note = 2'-O-methyluridine-3'-phosphate
  modified_base 17: mod_base = OTHER; note = 2'-O-methylcytidine-3'-phosphate
  modified_base 18: mod_base = OTHER; note = 2'-O-methylcytidine-3'-phosphate
  modified_base 19: mod_base = OTHER; note = 2'-O-methyluridine-3'-phosphorothioate
  modified_base 20: mod_base = OTHER; note = 2'-O-methyluridine-3'-phosphorothioate
  modified_base 21: mod_base = OTHER; note = 2'-O-methyladenosine
agtacccgagctgtctcctta

SEQ ID NO: 934 - RNA, 21 nt, synthetic construct
  source 1..21: mol_type = other RNA
  modified_base 1: mod_base = OTHER; note = 2'-O-methyluridine-3'-phosphorothioate
  modified_base 2: mod_base = OTHER; note = 2'-O-methyladenosine-3'-phosphorothioate
  modified_base 3: mod_base = OTHER; note = 2'-O-methylcytidine-3'-phosphate
  modified_base 4: mod_base = OTHER; note = 2'-O-methylcytidine-3'-phosphate
  modified_base 5: mod_base = OTHER; note = 2'-O-methylcytidine-3'-phosphate
  modified_base 6: mod_base = OTHER; note = 2'-O-hexadecyl-guanosine-3'-phosphate
  modified_base 7: mod_base = OTHER; note = 2'-deoxy-2'-fluoroadenosine-3'-phosphate
  modified_base 8: mod_base = OTHER; note = 2'-O-methylguanosine-3'-phosphate
  modified_base 9: mod_base = OTHER; note = 2'-deoxy-2'-fluorocytidine-3'-phosphate
  modified_base 10: mod_base = OTHER; note = 2'-deoxy-2'-fluorouridine-3'-phosphate
  modified_base 11: mod_base = OTHER; note = 2'-deoxy-2'-fluoroguanosine-3'-phosphate
  modified_base 12: mod_base = OTHER; note = 2'-O-methyluridine-3'-phosphate
  modified_base 13: mod_base = OTHER; note = 2'-O-methylcytidine-3'-phosphate
  modified_base 14: mod_base = OTHER; note = 2'-O-methyluridine-3'-phosphate
  modified_base 15: mod_base = OTHER; note = 2'-O-methylcytidine-3'-phosphate
  modified_base 16: mod_base = OTHER; note = 2'-O-methylcytidine-3'-phosphate
  modified_base 17: mod_base = OTHER; note = 2'-O-methyluridine-3'-phosphate
  modified_base 18: mod_base = OTHER; note = 2'-O-methyluridine-3'-phosphate
  modified_base 19: mod_base = OTHER; note = 2'-O-methylcytidine-3'-phosphorothioate
  modified_base 20: mod_base = OTHER; note = 2'-O-methylcytidine-3'-phosphorothioate
  modified_base 21: mod_base = OTHER; note = 2'-O-methyladenosine
tacccgagctgtctccttcca

SEQ ID NO: 935 - RNA, 21 nt, synthetic construct
  source 1..21: mol_type = other RNA
  modified_base 1: mod_base = OTHER; note = 2'-O-methylguanosine-3'-phosphorothioate
  modified_base 2: mod_base = OTHER; note = 2'-O-methyladenosine-3'-phosphorothioate
  modified_base 3: mod_base = OTHER; note = 2'-O-methylguanosine-3'-phosphate
  modified_base 4: mod_base = OTHER; note = 2'-O-methylguanosine-3'-phosphate
  modified_base 5: mod_base = OTHER; note = 2'-O-methyladenosine-3'-phosphate
  modified_base 6: mod_base = OTHER; note = 2'-O-hexadecyl-guanosine-3'-phosphate
  modified_base 7: mod_base = OTHER; note = 2'-deoxy-2'-fluoroadenosine-3'-phosphate
  modified_base 8: mod_base = OTHER; note = 2'-O-methyluridine-3'-phosphate
  modified_base 9: mod_base = OTHER; note = 2'-deoxy-2'-fluorocytidine-3'-phosphate
  modified_base 10: mod_base = OTHER; note = 2'-deoxy-2'-fluoroadenosine-3'-phosphate
  modified_base 11: mod_base = OTHER; note = 2'-deoxy-2'-fluorouridine-3'-phosphate
  modified_base 12: mod_base = OTHER; note = 2'-O-methylguanosine-3'-phosphate
  modified_base 13: mod_base = OTHER; note = 2'-O-methylcytidine-3'-phosphate
  modified_base 14: mod_base = OTHER; note = 2'-O-methylguanosine-3'-phosphate
  modified_base 15: mod_base = OTHER; note = 2'-O-methylguanosine-3'-phosphate
  modified_base 16: mod_base = OTHER; note = 2'-O-methylguanosine-3'-phosphate
  modified_base 17: mod_base = OTHER; note = 2'-O-methyladenosine-3'-phosphate
  modified_base 18: mod_base = OTHER; note = 2'-O-methyluridine-3'-phosphate
  modified_base 19: mod_base = OTHER; note = 2'-O-methylguanosine-3'-phosphorothioate
  modified_base 20: mod_base = OTHER; note = 2'-O-methyladenosine-3'-phosphorothioate
  modified_base 21: mod_base = OTHER; note = 2'-O-methyladenosine
gaggagatcatgcgggatgaa

SEQ ID NO: 936 - RNA, 21 nt, synthetic construct
  source 1..21: mol_type = other RNA
  modified_base 1: mod_base = OTHER; note = 2'-O-methyladenosine-3'-phosphorothioate
  modified_base 2: mod_base = OTHER; note = 2'-O-methylguanosine-3'-phosphorothioate
  modified_base 3: mod_base = OTHER; note = 2'-O-methyladenosine-3'-phosphate
  modified_base 4: mod_base = OTHER; note = 2'-O-methylcytidine-3'-phosphate
  modified_base 5: mod_base = OTHER; note = 2'-O-methylguanosine-3'-phosphate
  modified_base 6: mod_base = OTHER; note = 2'-O-hexadecyl-cytidine-3'-phosphate
  modified_base 7: mod_base = OTHER; note = 2'-deoxy-2'-fluorocytidine-3'-phosphate
  modified_base 8: mod_base = OTHER; note = 2'-O-methyluridine-3'-phosphate
  modified_base 9: mod_base = OTHER; note = 2'-deoxy-2'-fluoroguanosine-3'-phosphate
  modified_base 10: mod_base = OTHER; note = 2'-deoxy-2'-fluorocytidine-3'-phosphate
  modified_base 11: mod_base = OTHER; note = 2'-deoxy-2'-fluoroadenosine-3'-phosphate
  modified_base 12: mod_base = OTHER; note = 2'-O-methylcytidine-3'-phosphate
  modified_base 13: mod_base = OTHER; note = 2'-O-methyladenosine-3'-phosphate
  modified_base 14: mod_base = OTHER; note = 2'-O-methyladenosine-3'-phosphate
  modified_base 15: mod_base = OTHER; note = 2'-O-methyluridine-3'-phosphate
  modified_base 16: mod_base = OTHER; note = 2'-O-methyluridine-3'-phosphate
  modified_base 17: mod_base = OTHER; note = 2'-O-methyluridine-3'-phosphate
  modified_base 18: mod_base = OTHER; note = 2'-O-methylcytidine-3'-phosphate
  modified_base 19: mod_base = OTHER; note = 2'-O-methyladenosine-3'-phosphorothioate
  modified_base 20: mod_base = OTHER; note = 2'-O-methylguanosine-3'-phosphorothioate
  modified_base 21: mod_base = OTHER; note = 2'-O-methyladenosine
agacgcctgcacaatttcaga

SEQ ID NO: 937 - RNA, 21 nt, synthetic construct
  source 1..21: mol_type = other RNA
  modified_base 1: mod_base = OTHER; note = 2'-O-methylguanosine-3'-phosphorothioate
  modified_base 2: mod_base = OTHER; note = 2'-O-methyladenosine-3'-phosphorothioate
  modified_base 3: mod_base = OTHER; note = 2'-O-methylcytidine-3'-phosphate
  modified_base 4: mod_base = OTHER; note = 2'-O-methylguanosine-3'-phosphate
  modified_base 5: mod_base = OTHER; note = 2'-O-methylcytidine-3'-phosphate
  modified_base 6: mod_base = OTHER; note = 2'-O-hexadecyl-cytidine-3'-phosphate
  modified_base 7: mod_base = OTHER; note = 2'-deoxy-2'-fluorouridine-3'-phosphate
  modified_base 8: mod_base = OTHER; note = 2'-O-methylguanosine-3'-phosphate
  modified_base 9: mod_base = OTHER; note = 2'-deoxy-2'-fluorocytidine-3'-phosphate
  modified_base 10: mod_base = OTHER; note = 2'-deoxy-2'-fluoroadenosine-3'-phosphate
  modified_base 11: mod_base = OTHER; note = 2'-deoxy-2'-fluorocytidine-3'-phosphate
  modified_base 12: mod_base = OTHER; note = 2'-O-methyladenosine-3'-phosphate
  modified_base 13: mod_base = OTHER; note = 2'-O-methyladenosine-3'-phosphate
  modified_base 14: mod_base = OTHER; note = 2'-O-methyluridine-3'-phosphate
  modified_base 15: mod_base = OTHER; note = 2'-O-methyluridine-3'-phosphate
  modified_base 16: mod_base = OTHER; note = 2'-O-methyluridine-3'-phosphate
  modified_base 17: mod_base = OTHER; note = 2'-O-methylcytidine-3'-phosphate
  modified_base 18: mod_base = OTHER; note = 2'-O-methyladenosine-3'-phosphate
  modified_base 19: mod_base = OTHER; note = 2'-O-methylguanosine-3'-phosphorothioate
  modified_base 20: mod_base = OTHER; note = 2'-O-methylcytidine-3'-phosphorothioate
  modified_base 21: mod_base = OTHER; note = 2'-O-methyladenosine
gacgcctgcacaatttcagca

SEQ ID NO: 938 - RNA, 21 nt, synthetic construct
  source 1..21: mol_type = other RNA
  modified_base 1: mod_base = OTHER; note = 2'-O-methylcytidine-3'-phosphorothioate
  modified_base 2: mod_base = OTHER; note = 2'-O-methylguanosine-3'-phosphorothioate
  modified_base 3: mod_base = OTHER; note = 2'-O-methylcytidine-3'-phosphate
  modified_base 4: mod_base = OTHER; note = 2'-O-methylcytidine-3'-phosphate
  modified_base 5: mod_base = OTHER; note = 2'-O-methyluridine-3'-phosphate
  modified_base 6: mod_base = OTHER; note = 2'-O-hexadecyl-guanosine-3'-phosphate
  modified_base 7: mod_base = OTHER; note = 2'-deoxy-2'-fluorocytidine-3'-phosphate
  modified_base 8: mod_base = OTHER; note = 2'-O-methyladenosine-3'-phosphate
  modified_base 9: mod_base = OTHER; note = 2'-deoxy-2'-fluorocytidine-3'-phosphate
  modified_base 10: mod_base = OTHER; note = 2'-deoxy-2'-fluoroadenosine-3'-phosphate
  modified_base 11: mod_base = OTHER; note = 2'-deoxy-2'-fluoroadenosine-3'-phosphate
  modified_base 12: mod_base = OTHER; note = 2'-O-methyluridine-3'-phosphate
  modified_base 13: mod_base = OTHER; note = 2'-O-methyluridine-3'-phosphate
  modified_base 14: mod_base = OTHER; note = 2'-O-methyluridine-3'-phosphate
  modified_base 15: mod_base = OTHER; note = 2'-O-methylcytidine-3'-phosphate
  modified_base 16: mod_base = OTHER; note = 2'-O-methyladenosine-3'-phosphate
  modified_base 17: mod_base = OTHER; note = 2'-O-methylguanosine-3'-phosphate
  modified_base 18: mod_base = OTHER; note = 2'-O-methylcytidine-3'-phosphate
  modified_base 19: mod_base = OTHER; note = 2'-O-methylcytidine-3'-phosphorothioate
  modified_base 20: mod_base = OTHER; note = 2'-O-methylcytidine-3'-phosphorothioate
  modified_base 21: mod_base = OTHER; note = 2'-O-methyladenosine
cgcctgcacaatttcagccca

SEQ ID NO: 939 - RNA, 21 nt, synthetic construct
  source 1..21: mol_type = other RNA
  modified_base 1: mod_base = OTHER; note = 2'-O-methylcytidine-3'-phosphorothioate
  modified_base 2: mod_base = OTHER; note = 2'-O-methylcytidine-3'-phosphorothioate
  modified_base 3: mod_base = OTHER; note = 2'-O-methyluridine-3'-phosphate
  modified_base 4: mod_base = OTHER; note = 2'-O-methylguanosine-3'-phosphate
  modified_base 5: mod_base = OTHER; note = 2'-O-methylcytidine-3'-phosphate
  modified_base 6: mod_base = OTHER; note = 2'-O-hexadecyl-adenosine-3'-phosphate
  modified_base 7: mod_base = OTHER; note = 2'-deoxy-2'-fluorocytidine-3'-phosphate
  modified_base 8: mod_base = OTHER; note = 2'-O-methyladenosine-3'-phosphate
  modified_base 9: mod_base = OTHER; note = 2'-deoxy-2'-fluoroadenosine-3'-phosphate
  modified_base 10: mod_base = OTHER; note = 2'-deoxy-2'-fluorouridine-3'-phosphate
  modified_base 11: mod_base = OTHER; note = 2'-deoxy-2'-fluorouridine-3'-phosphate
  modified_base 12: mod_base = OTHER; note = 2'-O-methyluridine-3'-phosphate
  modified_base 13: mod_base = OTHER; note = 2'-O-methylcytidine-3'-phosphate
  modified_base 14: mod_base = OTHER; note = 2'-O-methyladenosine-3'-phosphate
  modified_base 15: mod_base = OTHER; note = 2'-O-methylguanosine-3'-phosphate
  modified_base 16: mod_base = OTHER; note = 2'-O-methylcytidine-3'-phosphate
  modified_base 17: mod_base = OTHER; note = 2'-O-methylcytidine-3'-phosphate
  modified_base 18: mod_base = OTHER; note = 2'-O-methylcytidine-3'-phosphate
  modified_base 19: mod_base = OTHER; note = 2'-O-methyladenosine-3'-phosphorothioate
  modified_base 20: mod_base = OTHER; note = 2'-O-methyladenosine-3'-phosphorothioate
  modified_base 21: mod_base = OTHER; note = 2'-O-methyladenosine
cctgcacaatttcagcccaaa

SEQ ID NO: 940 - RNA, 21 nt, synthetic construct
  source 1..21: mol_type = other RNA
  modified_base 1: mod_base = OTHER; note = 2'-O-methylcytidine-3'-phosphorothioate
  modified_base 2: mod_base = OTHER; note = 2'-O-methyluridine-3'-phosphorothioate
  modified_base 3: mod_base = OTHER; note = 2'-O-methylguanosine-3'-phosphate
  modified_base 4: mod_base = OTHER; note = 2'-O-methylcytidine-3'-phosphate
  modified_base 5: mod_base = OTHER; note = 2'-O-methyladenosine-3'-phosphate
  modified_base 6: mod_base = OTHER; note = 2'-O-hexadecyl-cytidine-3'-phosphate
  modified_base 7: mod_base = OTHER; note = 2'-deoxy-2'-fluoroadenosine-3'-phosphate
  modified_base 8: mod_base = OTHER; note = 2'-O-methyladenosine-3'-phosphate
  modified_base 9: mod_base = OTHER; note = 2'-deoxy-2'-fluorouridine-3'-phosphate
  modified_base 10: mod_base = OTHER; note = 2'-deoxy-2'-fluorouridine-3'-phosphate
  modified_base 11: mod_base = OTHER; note = 2'-deoxy-2'-fluorouridine-3'-phosphate
  modified_base 12: mod_base = OTHER; note = 2'-O-methylcytidine-3'-phosphate
  modified_base 13: mod_base = OTHER; note = 2'-O-methyladenosine-3'-phosphate
  modified_base 14: mod_base = OTHER; note = 2'-O-methylguanosine-3'-phosphate
  modified_base 15: mod_base = OTHER; note = 2'-O-methylcytidine-3'-phosphate
  modified_base 16: mod_base = OTHER; note = 2'-O-methylcytidine-3'-phosphate
  modified_base 17: mod_base = OTHER; note = 2'-O-methylcytidine-3'-phosphate
  modified_base 18: mod_base = OTHER; note = 2'-O-methyladenosine-3'-phosphate
  modified_base 19: mod_base = OTHER; note = 2'-O-methyladenosine-3'-phosphorothioate
  modified_base 20: mod_base = OTHER; note = 2'-O-methylguanosine-3'-phosphorothioate
  modified_base 21: mod_base = OTHER; note = 2'-O-methyladenosine
ctgcacaatttcagcccaaga

SEQ ID NO: 941 - RNA, 21 nt, synthetic construct
  source 1..21: mol_type = other RNA
  modified_base 1: mod_base = OTHER; note = 2'-O-methyluridine-3'-phosphorothioate
  modified_base 2: mod_base = OTHER; note = 2'-O-methylguanosine-3'-phosphorothioate
  modified_base 3: mod_base = OTHER; note = 2'-O-methylcytidine-3'-phosphate
  modified_base 4: mod_base = OTHER; note = 2'-O-methyladenosine-3'-phosphate
  modified_base 5: mod_base = OTHER; note = 2'-O-methylcytidine-3'-phosphate
  modified_base 6: mod_base = OTHER; note = 2'-O-hexadecyl-adenosine-3'-phosphate
  modified_base 7: mod_base = OTHER; note = 2'-deoxy-2'-fluoroadenosine-3'-phosphate
  modified_base 8: mod_base = OTHER; note = 2'-O-methyluridine-3'-phosphate
  modified_base 9: mod_base = OTHER; note = 2'-deoxy-2'-fluorouridine-3'-phosphate
  modified_base 10: mod_base = OTHER; note = 2'-deoxy-2'-fluorouridine-3'-phosphate
  modified_base 11: mod_base = OTHER; note = 2'-deoxy-2'-fluorocytidine-3'-phosphate
  modified_base 12: mod_base = OTHER; note = 2'-O-methyladenosine-3'-phosphate
  modified_base 13: mod_base = OTHER; note = 2'-O-methylguanosine-3'-phosphate
  modified_base 14: mod_base = OTHER; note = 2'-O-methylcytidine-3'-phosphate
  modified_base 15: mod_base = OTHER; note = 2'-O-methylcytidine-3'-phosphate
  modified_base 16: mod_base = OTHER; note = 2'-O-methylcytidine-3'-phosphate
  modified_base 17: mod_base = OTHER; note = 2'-O-methyladenosine-3'-phosphate
  modified_base 18: mod_base = OTHER; note = 2'-O-methyladenosine-3'-phosphate
  modified_base 19: mod_base = OTHER; note = 2'-O-methylguanosine-3'-phosphorothioate
  modified_base 20: mod_base = OTHER; note = 2'-O-methylcytidine-3'-phosphorothioate
  modified_base 21: mod_base = OTHER; note = 2'-O-methyladenosine
tgcacaatttcagcccaagca

SEQ ID NO: 942 - RNA, 21 nt, synthetic construct
  source 1..21: mol_type = other RNA
  modified_base 1: mod_base = OTHER; note = 2'-O-methylcytidine-3'-phosphorothioate
  modified_base 2: mod_base = OTHER; note = 2'-O-methyladenosine-3'-phosphorothioate
  modified_base 3: mod_base = OTHER; note = 2'-O-methyladenosine-3'-phosphate
  modified_base 4: mod_base = OTHER; note = 2'-O-methyluridine-3'-phosphate
  modified_base 5: mod_base = OTHER; note = 2'-O-methyluridine-3'-phosphate
  modified_base 6: mod_base = OTHER; note = 2'-O-hexadecyl-uridine-3'-phosphate
  modified_base 7: mod_base = OTHER; note = 2'-deoxy-2'-fluorocytidine-3'-phosphate
  modified_base 8: mod_base = OTHER; note = 2'-O-methyladenosine-3'-phosphate
  modified_base 9: mod_base = OTHER; note = 2'-deoxy-2'-fluoroguanosine-3'-phosphate
  modified_base 10: mod_base = OTHER; note = 2'-deoxy-2'-fluorocytidine-3'-phosphate
  modified_base 11: mod_base = OTHER; note = 2'-deoxy-2'-fluorocytidine-3'-phosphate
  modified_base 12: mod_base = OTHER; note = 2'-O-methylcytidine-3'-phosphate
  modified_base 13: mod_base = OTHER; note = 2'-O-methyladenosine-3'-phosphate
  modified_base 14: mod_base = OTHER; note = 2'-O-methyladenosine-3'-phosphate
  modified_base 15: mod_base = OTHER; note = 2'-O-methylguanosine-3'-phosphate
  modified_base 16: mod_base = OTHER; note = 2'-O-methylcytidine-3'-phosphate
  modified_base 17: mod_base = OTHER; note = 2'-O-methyluridine-3'-phosphate
  modified_base 18: mod_base = OTHER; note = 2'-O-methyluridine-3'-phosphate
  modified_base 19: mod_base = OTHER; note = 2'-O-methylcytidine-3'-phosphorothioate
  modified_base 20: mod_base = OTHER; note = 2'-O-methyluridine-3'-phosphorothioate
  modified_base 21: mod_base = OTHER; note = 2'-O-methyladenosine
caatttcagcccaagcttcta

SEQ ID NO: 943 - RNA, 21 nt, synthetic construct
  source 1..21: mol_type = other RNA
  modified_base 1: mod_base = OTHER; note = 2'-O-methyladenosine-3'-phosphorothioate
  modified_base 2: mod_base = OTHER; note = 2'-O-methyladenosine-3'-phosphorothioate
  modified_base 3: mod_base = OTHER; note = 2'-O-methyluridine-3'-phosphate
  modified_base 4: mod_base = OTHER; note = 2'-O-methyluridine-3'-phosphate
  modified_base 5: mod_base = OTHER; note = 2'-O-methyluridine-3'-phosphate
  modified_base 6: mod_base = OTHER; note = 2'-O-hexadecyl-cytidine-3'-phosphate
  modified_base 7: mod_base = OTHER; note = 2'-deoxy-2'-fluoroadenosine-3'-phosphate
  modified_base 8: mod_base = OTHER; note = 2'-O-methylguanosine-3'-phosphate
  modified_base 9: mod_base = OTHER; note = 2'-deoxy-2'-fluorocytidine-3'-phosphate
  modified_base 10: mod_base = OTHER; note = 2'-deoxy-2'-fluorocytidine-3'-phosphate
  modified_base 11: mod_base = OTHER; note = 2'-deoxy-2'-fluorocytidine-3'-phosphate
  modified_base 12: mod_base = OTHER; note = 2'-O-methyladenosine-3'-phosphate
  modified_base 13: mod_base = OTHER; note = 2'-O-methyladenosine-3'-phosphate
  modified_base 14: mod_base = OTHER; note = 2'-O-methylguanosine-3'-phosphate
  modified_base 15: mod_base = OTHER; note = 2'-O-methylcytidine-3'-phosphate
  modified_base 16: mod_base = OTHER; note = 2'-O-methyluridine-3'-phosphate
  modified_base 17: mod_base = OTHER; note = 2'-O-methyluridine-3'-phosphate
  modified_base 18: mod_base = OTHER; note = 2'-O-methylcytidine-3'-phosphate
  modified_base 19: mod_base = OTHER; note = 2'-O-methyluridine-3'-phosphorothioate
  modified_base 20: mod_base = OTHER; note = 2'-O-methyladenosine-3'-phosphorothioate
  modified_base 21: mod_base = OTHER; note = 2'-O-methyladenosine
aatttcagcccaagcttctaa

SEQ ID NO: 944 - RNA, 21 nt, synthetic construct
  source 1..21: mol_type = other RNA
  modified_base 1: mod_base = OTHER; note = 2'-O-methylcytidine-3'-phosphorothioate
  modified_base 2: mod_base = OTHER; note = 2'-O-methyladenosine-3'-phosphorothioate
  modified_base 3: mod_base = OTHER; note = 2'-O-methylguanosine-3'-phosphate
  modified_base 4: mod_base = OTHER; note = 2'-O-methylcytidine-3'-phosphate
  modified_base 5: mod_base = OTHER; note = 2'-O-methylcytidine-3'-phosphate
  modified_base 6: mod_base = OTHER; note = 2'-O-hexadecyl-cytidine-3'-phosphate
  modified_base 7: mod_base = OTHER; note = 2'-deoxy-2'-fluoroadenosine-3'-phosphate
  modified_base 8: mod_base = OTHER; note = 2'-O-methyladenosine-3'-phosphate
  modified_base 9: mod_base = OTHER; note = 2'-deoxy-2'-fluoroguanosine-3'-phosphate
  modified_base 10: mod_base = OTHER; note = 2'-deoxy-2'-fluorocytidine-3'-phosphate
  modified_base 11: mod_base = OTHER; note = 2'-deoxy-2'-fluorouridine-3'-phosphate
  modified_base 12: mod_base = OTHER; note = 2'-O-methyluridine-3'-phosphate
  modified_base 13: mod_base = OTHER; note = 2'-O-methylcytidine-3'-phosphate
  modified_base 14: mod_base = OTHER; note = 2'-O-methyluridine-3'-phosphate
  modified_base 15: mod_base = OTHER; note = 2'-O-methyladenosine-3'-phosphate
  modified_base 16: mod_base = OTHER; note = 2'-O-methylguanosine-3'-phosphate
  modified_base 17: mod_base = OTHER; note = 2'-O-methyladenosine-3'-phosphate
  modified_base 18: mod_base = OTHER; note = 2'-O-methylguanosine-3'-phosphate
  modified_base 19: mod_base = OTHER; note = 2'-O-methyladenosine-3'-phosphorothioate
  modified_base 20: mod_base = OTHER; note = 2'-O-methylguanosine-3'-phosphorothioate
  modified_base 21: mod_base = OTHER; note = 2'-O-methyladenosine
cagcccaagcttctagagaga

SEQ ID NO: 945 - RNA, 21 nt, synthetic construct
  source 1..21: mol_type = other RNA
  modified_base 1: mod_base = OTHER; note = 2'-O-methyladenosine-3'-phosphorothioate
  modified_base 2: mod_base = OTHER; note = 2'-O-methylguanosine-3'-phosphorothioate
  modified_base 3: mod_base = OTHER; note = 2'-O-methylcytidine-3'-phosphate
  modified_base 4: mod_base = OTHER; note = 2'-O-methylcytidine-3'-phosphate
  modified_base 5: mod_base = OTHER; note = 2'-O-methylcytidine-3'-phosphate
  modified_base 6: mod_base = OTHER; note = 2'-O-hexadecyl-adenosine-3'-phosphate
  modified_base 7: mod_base = OTHER; note = 2'-deoxy-2'-fluoroadenosine-3'-phosphate
  modified_base 8: mod_base = OTHER; note = 2'-O-methylguanosine-3'-phosphate
  modified_base 9: mod_base = OTHER; note = 2'-deoxy-2'-fluorocytidine-3'-phosphate
  modified_base 10: mod_base = OTHER; note = 2'-deoxy-2'-fluorouridine-3'-phosphate
  modified_base 11: mod_base = OTHER; note = 2'-deoxy-2'-fluorouridine-3'-phosphate
  modified_base 12: mod_base = OTHER; note = 2'-O-methylcytidine-3'-phosphate
  modified_base 13: mod_base = OTHER; note = 2'-O-methyluridine-3'-phosphate
  modified_base 14: mod_base = OTHER; note = 2'-O-methyladenosine-3'-phosphate
  modified_base 15: mod_base = OTHER; note = 2'-O-methylguanosine-3'-phosphate
  modified_base 16: mod_base = OTHER; note = 2'-O-methyladenosine-3'-phosphate
  modified_base 17: mod_base = OTHER; note = 2'-O-methylguanosine-3'-phosphate
  modified_base 18: mod_base = OTHER; note = 2'-O-methyladenosine-3'-phosphate
  modified_base 19: mod_base = OTHER; note = 2'-O-methylguanosine-3'-phosphorothioate
  modified_base 20: mod_base = OTHER; note = 2'-O-methyluridine-3'-phosphorothioate
  modified_base 21: mod_base = OTHER; note = 2'-O-methyladenosine
agcccaagcttctagagagta

SEQ ID NO: 946 - RNA, 21 nt, synthetic construct
  source 1..21: mol_type = other RNA
  modified_base 1: mod_base = OTHER; note = 2'-O-methylguanosine-3'-phosphorothioate
  modified_base 2: mod_base = OTHER; note = 2'-O-methylcytidine-3'-phosphorothioate
  modified_base 3: mod_base = OTHER; note = 2'-O-methylcytidine-3'-phosphate
  modified_base 4: mod_base = OTHER; note = 2'-O-methylcytidine-3'-phosphate
  modified_base 5: mod_base = OTHER; note = 2'-O-methyladenosine-3'-phosphate
  modified_base 6: mod_base = OTHER; note = 2'-O-hexadecyl-adenosine-3'-phosphate
  modified_base 7: mod_base = OTHER; note = 2'-deoxy-2'-fluoroguanosine-3'-phosphate
  modified_base 8: mod_base = OTHER; note = 2'-O-methylcytidine-3'-phosphate
  modified_base 9: mod_base = OTHER; note = 2'-deoxy-2'-fluorouridine-3'-phosphate
  modified_base 10: mod_base = OTHER; note = 2'-deoxy-2'-fluorouridine-3'-phosphate
  modified_base 11: mod_base = OTHER; note = 2'-deoxy-2'-fluorocytidine-3'-phosphate
  modified_base 12: mod_base = OTHER; note = 2'-O-methyluridine-3'-phosphate
  modified_base 13: mod_base = OTHER; note = 2'-O-methyladenosine-3'-phosphate
  modified_base 14: mod_base = OTHER; note = 2'-O-methylguanosine-3'-phosphate
  modified_base 15: mod_base = OTHER; note = 2'-O-methyladenosine-3'-phosphate
  modified_base 16: mod_base = OTHER; note = 2'-O-methylguanosine-3'-phosphate
  modified_base 17: mod_base = OTHER; note = 2'-O-methyladenosine-3'-phosphate
  modified_base 18: mod_base = OTHER; note = 2'-O-methylguanosine-3'-phosphate
  modified_base 19: mod_base = OTHER; note = 2'-O-methyluridine-3'-phosphorothioate
  modified_base 20: mod_base = OTHER; note = 2'-O-methylguanosine-3'-phosphorothioate
  modified_base 21: mod_base = OTHER; note = 2'-O-methyladenosine
gcccaagcttctagagagtga

SEQ ID NO: 947 - RNA, 21 nt, synthetic construct
  source 1..21: mol_type = other RNA
  modified_base 1: mod_base = OTHER; note = 2'-O-methylcytidine-3'-phosphorothioate
  modified_base 2: mod_base = OTHER; note = 2'-O-methylcytidine-3'-phosphorothioate
  modified_base 3: mod_base = OTHER; note = 2'-O-methylcytidine-3'-phosphate
  modified_base 4: mod_base = OTHER; note = 2'-O-methyladenosine-3'-phosphate
  modified_base 5: mod_base = OTHER; note = 2'-O-methyladenosine-3'-phosphate
  modified_base 6: mod_base = OTHER; note = 2'-O-hexadecyl-guanosine-3'-phosphate
  modified_base 7: mod_base = OTHER; note = 2'-deoxy-2'-fluorocytidine-3'-phosphate
  modified_base 8: mod_base = OTHER; note = 2'-O-methyluridine-3'-phosphate
  modified_base 9: mod_base = OTHER; note = 2'-deoxy-2'-fluorouridine-3'-phosphate
  modified_base 10: mod_base = OTHER; note = 2'-deoxy-2'-fluorocytidine-3'-phosphate
  modified_base 11: mod_base = OTHER; note = 2'-deoxy-2'-fluorouridine-3'-phosphate
  modified_base 12: mod_base = OTHER; note = 2'-O-methyladenosine-3'-phosphate
  modified_base 13: mod_base = OTHER; note = 2'-O-methylguanosine-3'-phosphate
  modified_base 14: mod_base = OTHER; note = 2'-O-methyladenosine-3'-phosphate
  modified_base 15: mod_base = OTHER; note = 2'-O-methylguanosine-3'-phosphate
  modified_base 16: mod_base = OTHER; note = 2'-O-methyladenosine-3'-phosphate
  modified_base 17: mod_base = OTHER; note = 2'-O-methylguanosine-3'-phosphate
  modified_base 18: mod_base = OTHER; note = 2'-O-methyluridine-3'-phosphate
  modified_base 19: mod_base = OTHER; note = 2'-O-methylguanosine-3'-phosphorothioate
  modified_base 20: mod_base = OTHER; note = 2'-O-methylguanosine-3'-phosphorothioate
  modified_base 21: mod_base = OTHER; note = 2'-O-methyladenosine
cccaagcttctagagagtgga

SEQ ID NO: 948 - RNA, 21 nt, synthetic construct
  source 1..21: mol_type = other RNA
  modified_base 1: mod_base = OTHER; note = 2'-O-methylcytidine-3'-phosphorothioate
  modified_base 2: mod_base = OTHER; note = 2'-O-methylcytidine-3'-phosphorothioate
  modified_base 3: mod_base = OTHER; note = 2'-O-methyladenosine-3'-phosphate
  modified_base 4: mod_base = OTHER; note = 2'-O-methyladenosine-3'-phosphate
  modified_base 5: mod_base = OTHER; note = 2'-O-methylguanosine-3'-phosphate
  modified_base 6: mod_base = OTHER; note = 2'-O-hexadecyl-cytidine-3'-phosphate
  modified_base 7: mod_base = OTHER; note = 2'-deoxy-2'-fluorouridine-3'-phosphate
  modified_base 8: mod_base = OTHER; note = 2'-O-methyluridine-3'-phosphate
  modified_base 9: mod_base = OTHER; note = 2'-deoxy-2'-fluorocytidine-3'-phosphate
  modified_base 10: mod_base = OTHER; note = 2'-deoxy-2'-fluorouridine-3'-phosphate
  modified_base 11: mod_base = OTHER; note = 2'-deoxy-2'-fluoroadenosine-3'-phosphate
  modified_base 12: mod_base = OTHER; note = 2'-O-methylguanosine-3'-phosphate
  modified_base 13: mod_base = OTHER; note = 2'-O-methyladenosine-3'-phosphate
  modified_base 14: mod_base = OTHER; note = 2'-O-methylguanosine-3'-phosphate
  modified_base 15: mod_base = OTHER; note = 2'-O-methyladenosine-3'-phosphate
  modified_base 16: mod_base = OTHER; note = 2'-O-methylguanosine-3'-phosphate
  modified_base 17: mod_base = OTHER; note = 2'-O-methyluridine-3'-phosphate
  modified_base 18: mod_base = OTHER; note = 2'-O-methylguanosine-3'-phosphate
  modified_base 19: mod_base = OTHER; note = 2'-O-methylguanosine-3'-phosphorothioate
  modified_base 20: mod_base = OTHER; note = 2'-O-methyluridine-3'-phosphorothioate
  modified_base 21: mod_base = OTHER; note = 2'-O-methyladenosine
ccaagcttctagagagtggta

SEQ ID NO: 949 - RNA, 21 nt, synthetic construct
  source 1..21: mol_type = other RNA
  modified_base 1: mod_base = OTHER; note = 2'-O-methylcytidine-3'-phosphorothioate
  modified_base 2: mod_base = OTHER; note = 2'-O-methyladenosine-3'-phosphorothioate
  modified_base 3: mod_base = OTHER; note = 2'-O-methyladenosine-3'-phosphate
  modified_base 4: mod_base = OTHER; note = 2'-O-methylguanosine-3'-phosphate
  modified_base 5: mod_base = OTHER; note = 2'-O-methylcytidine-3'-phosphate
  modified_base 6: mod_base = OTHER; note = 2'-O-hexadecyl-uridine-3'-phosphate
  modified_base 7: mod_base = OTHER; note = 2'-deoxy-2'-fluorouridine-3'-phosphate
  modified_base 8: mod_base = OTHER; note = 2'-O-methylcytidine-3'-phosphate
  modified_base 9: mod_base = OTHER; note = 2'-deoxy-2'-fluorouridine-3'-phosphate
  modified_base 10: mod_base = OTHER; note = 2'-deoxy-2'-fluoroadenosine-3'-phosphate
  modified_base 11: mod_base = OTHER; note = 2'-deoxy-2'-fluoroguanosine-3'-phosphate
  modified_base 12: mod_base = OTHER; note = 2'-O-methyladenosine-3'-phosphate
  modified_base 13: mod_base = OTHER; note = 2'-O-methylguanosine-3'-phosphate
  modified_base 14: mod_base = OTHER; note = 2'-O-methyladenosine-3'-phosphate
  modified_base 15: mod_base = OTHER; note = 2'-O-methylguanosine-3'-phosphate
  modified_base 16: mod_base = OTHER; note = 2'-O-methyluridine-3'-phosphate
  modified_base 17: mod_base = OTHER; note = 2'-O-methylguanosine-3'-phosphate
  modified_base 18: mod_base = OTHER; note = 2'-O-methylguanosine-3'-phosphate
  modified_base 19: mod_base = OTHER; note = 2'-O-methyluridine-3'-phosphorothioate
  modified_base 20: mod_base = OTHER; note = 2'-O-methylguanosine-3'-phosphorothioate
  modified_base 21: mod_base = OTHER; note = 2'-O-methyladenosine
caagcttctagagagtggtga

SEQ ID NO: 950 - RNA, 21 nt, synthetic construct
  source 1..21: mol_type = other RNA
  modified_base 1: mod_base = OTHER; note = 2'-O-methyladenosine-3'-phosphorothioate
  modified_base 2: mod_base = OTHER; note = 2'-O-methyladenosine-3'-phosphorothioate
  modified_base 3: mod_base = OTHER; note = 2'-O-methylguanosine-3'-phosphate
  modified_base 4: mod_base = OTHER; note = 2'-O-methylcytidine-3'-phosphate
  modified_base 5: mod_base = OTHER; note = 2'-O-methyluridine-3'-phosphate
  modified_base 6: mod_base = OTHER; note = 2'-O-hexadecyl-uridine-3'-phosphate
  modified_base 7: mod_base = OTHER; note = 2'-deoxy-2'-fluorocytidine-3'-phosphate
  modified_base 8: mod_base = OTHER; note = 2'-O-methyluridine-3'-phosphate
  modified_base 9: mod_base = OTHER; note = 2'-deoxy-2'-fluoroadenosine-3'-phosphate
  modified_base 10: mod_base = OTHER; note = 2'-deoxy-2'-fluoroguanosine-3'-phosphate
  modified_base 11: mod_base = OTHER; note = 2'-deoxy-2'-fluoroadenosine-3'-phosphate
  modified_base 12: mod_base = OTHER; note = 2'-O-methylguanosine-3'-phosphate
  modified_base 13: mod_base = OTHER; note = 2'-O-methyladenosine-3'-phosphate
  modified_base 14: mod_base = OTHER; note = 2'-O-methylguanosine-3'-phosphate
  modified_base 15: mod_base = OTHER; note = 2'-O-methyluridine-3'-phosphate
  modified_base 16: mod_base = OTHER; note = 2'-O-methylguanosine-3'-phosphate
  modified_base 17: mod_base = OTHER; note = 2'-O-methylguanosine-3'-phosphate
  modified_base 18: mod_base = OTHER; note = 2'-O-methyluridine-3'-phosphate
  modified_base 19: mod_base = OTHER; note = 2'-O-methylguanosine-3'-phosphorothioate
  modified_base 20: mod_base = OTHER; note = 2'-O-methyladenosine-3'-phosphorothioate
  modified_base 21: mod_base = OTHER; note = 2'-O-methyladenosine
aagcttctagagagtggtgaa

SEQ ID NO: 951 - RNA, 21 nt, synthetic construct
  source 1..21: mol_type = other RNA
  modified_base 1: mod_base = OTHER; note = 2'-O-methyladenosine-3'-phosphorothioate
  modified_base 2: mod_base = OTHER; note = 2'-O-methylguanosine-3'-phosphorothioate
  modified_base 3: mod_base = OTHER; note = 2'-O-methylcytidine-3'-phosphate
  modified_base 4: mod_base = OTHER; note = 2'-O-methyluridine-3'-phosphate
  modified_base 5: mod_base = OTHER; note = 2'-O-methyluridine-3'-phosphate
  modified_base 6: mod_base = OTHER; note = 2'-O-hexadecyl-cytidine-3'-phosphate
  modified_base 7: mod_base = OTHER; note = 2'-deoxy-2'-fluorouridine-3'-phosphate
  modified_base 8: mod_base = OTHER; note = 2'-O-methyladenosine-3'-phosphate
  modified_base 9: mod_base = OTHER; note = 2'-deoxy-2'-fluoroguanosine-3'-phosphate
  modified_base 10: mod_base = OTHER; note = 2'-deoxy-2'-fluoroadenosine-3'-phosphate
  modified_base 11: mod_base = OTHER; note = 2'-deoxy-2'-fluoroguanosine-3'-phosphate
  modified_base 12: mod_base = OTHER; note = 2'-O-methyladenosine-3'-phosphate
  modified_base 13: mod_base = OTHER; note = 2'-O-methylguanosine-3'-phosphate
  modified_base 14: mod_base = OTHER; note = 2'-O-methyluridine-3'-phosphate
  modified_base 15: mod_base = OTHER; note = 2'-O-methylguanosine-3'-phosphate
  modified_base 16: mod_base = OTHER; note = 2'-O-methylguanosine-3'-phosphate
  modified_base 17: mod_base = OTHER; note = 2'-O-methyluridine-3'-phosphate
  modified_base 18: mod_base = OTHER; note = 2'-O-methylguanosine-3'-phosphate
  modified_base 19: mod_base = OTHER; note = 2'-O-methyladenosine-3'-phosphorothioate
  modified_base 20: mod_base = OTHER; note = 2'-O-methyluridine-3'-phosphorothioate
  modified_base 21: mod_base = OTHER; note = 2'-O-methyladenosine
agcttctagagagtggtgata

SEQ ID NO: 952 - RNA, 21 nt, synthetic construct
  source 1..21: mol_type = other RNA
  modified_base 1: mod_base = OTHER; note = 2'-O-methylguanosine-3'-phosphorothioate
  modified_base 2: mod_base = OTHER; note = 2'-O-methylcytidine-3'-phosphorothioate
  modified_base 3: mod_base = OTHER; note = 2'-O-methyluridine-3'-phosphate
  modified_base 4: mod_base = OTHER; note = 2'-O-methyluridine-3'-phosphate
  modified_base 5: mod_base = OTHER; note = 2'-O-methylcytidine-3'-phosphate
  modified_base 6: mod_base = OTHER; note = 2'-O-hexadecyl-uridine-3'-phosphate
  modified_base 7: mod_base = OTHER; note = 2'-deoxy-2'-fluoroadenosine-3'-phosphate
  modified_base 8: mod_base = OTHER; note = 2'-O-methylguanosine-3'-phosphate
  modified_base 9: mod_base = OTHER; note = 2'-deoxy-2'-fluoroadenosine-3'-phosphate
  modified_base 10: mod_base = OTHER; note = 2'-deoxy-2'-fluoroguanosine-3'-phosphate
  modified_base 11: mod_base = OTHER; note = 2'-deoxy-2'-fluoroadenosine-3'-phosphate
  modified_base 12: mod_base = OTHER; note = 2'-O-methylguanosine-3'-phosphate
  modified_base 13: mod_base = OTHER; note = 2'-O-methyluridine-3'-phosphate
  modified_base 14: mod_base = OTHER; note = 2'-O-methylguanosine-3'-phosphate
  modified_base 15: mod_base = OTHER; note = 2'-O-methylguanosine-3'-phosphate
  modified_base 16: mod_base = OTHER; note = 2'-O-methyluridine-3'-phosphate
  modified_base 17: mod_base = OTHER; note = 2'-O-methylguanosine-3'-phosphate
  modified_base 18: mod_base = OTHER; note = 2'-O-methyladenosine-3'-phosphate
  modified_base 19: mod_base = OTHER; note = 2'-O-methyluridine-3'-phosphorothioate
  modified_base 20: mod_base = OTHER; note = 2'-O-methylguanosine-3'-phosphorothioate
  modified_base 21: mod_base = OTHER; note = 2'-O-methyladenosine
gcttctagagagtggtgatga

SEQ ID NO: 953 - RNA, 21 nt, synthetic construct
  source 1..21: mol_type = other RNA
  modified_base 1: mod_base = OTHER; note = 2'-O-methyluridine-3'-phosphorothioate
  modified_base 2: mod_base = OTHER; note = 2'-O-methyluridine-3'-phosphorothioate
  modified_base 3: mod_base = OTHER; note = 2'-O-methylcytidine-3'-phosphate
  modified_base 4: mod_base = OTHER; note = 2'-O-methyluridine-3'-phosphate
  modified_base 5: mod_base = OTHER; note = 2'-O-methyladenosine-3'-phosphate
  modified_base 6: mod_base = OTHER; note = 2'-O-hexadecyl-guanosine-3'-phosphate
  modified_base 7: mod_base = OTHER; note = 2'-deoxy-2'-fluoroadenosine-3'-phosphate
  modified_base 8: mod_base = OTHER; note = 2'-O-methylguanosine-3'-phosphate
  modified_base 9: mod_base = OTHER; note = 2'-deoxy-2'-fluoroadenosine-3'-phosphate
  modified_base 10: mod_base = OTHER; note = 2'-deoxy-2'-fluoroguanosine-3'-phosphate
  modified_base 11: mod_base = OTHER; note = 2'-deoxy-2'-fluorouridine-3'-phosphate
  modified_base 12: mod_base = OTHER; note = 2'-O-methylguanosine-3'-phosphate
  modified_base 13: mod_base = OTHER; note = 2'-O-methylguanosine-3'-phosphate
  modified_base 14: mod_base = OTHER; note = 2'-O-methyluridine-3'-phosphate
  modified_base 15: mod_base = OTHER; note = 2'-O-methylguanosine-3'-phosphate
  modified_base 16: mod_base = OTHER; note = 2'-O-methyladenosine-3'-phosphate
  modified_base 17: mod_base = OTHER; note = 2'-O-methyluridine-3'-phosphate
  modified_base 18: mod_base = OTHER; note = 2'-O-methylguanosine-3'-phosphate
  modified_base 19: mod_base = OTHER; note = 2'-O-methyladenosine-3'-phosphorothioate
  modified_base 20: mod_base = OTHER; note = 2'-O-methylcytidine-3'-phosphorothioate
  modified_base 21: mod_base = OTHER; note = 2'-O-methyladenosine
ttctagagagtggtgatgaca

SEQ ID NO: 954 - RNA, 21 nt, synthetic construct
  source 1..21: mol_type = other RNA
  modified_base 1: mod_base = OTHER; note = 2'-O-methyluridine-3'-phosphorothioate
  modified_base 2: mod_base = OTHER; note = 2'-O-methyladenosine-3'-phosphorothioate
  modified_base 3: mod_base = OTHER; note = 2'-O-methylguanosine-3'-phosphate
  modified_base 4: mod_base = OTHER; note = 2'-O-methyladenosine-3'-phosphate
  modified_base 5: mod_base = OTHER; note = 2'-O-methylguanosine-3'-phosphate
  modified_base 6: mod_base = OTHER; note = 2'-O-hexadecyl-adenosine-3'-phosphate
  modified_base 7: mod_base = OTHER; note = 2'-deoxy-2'-fluoroguanosine-3'-phosphate
  modified_base 8: mod_base = OTHER; note = 2'-O-methyluridine-3'-phosphate
  modified_base 9: mod_base = OTHER; note = 2'-deoxy-2'-fluoroguanosine-3'-phosphate
  modified_base 10: mod_base = OTHER; note = 2'-deoxy-2'-fluoroguanosine-3'-phosphate
  modified_base 11: mod_base = OTHER; note = 2'-deoxy-2'-fluorouridine-3'-phosphate
  modified_base 12: mod_base = OTHER; note = 2'-O-methylguanosine-3'-phosphate
  modified_base 13: mod_base = OTHER; note = 2'-O-methyladenosine-3'-phosphate
  modified_base 14: mod_base = OTHER; note = 2'-O-methyluridine-3'-phosphate
  modified_base 15: mod_base = OTHER; note = 2'-O-methylguanosine-3'-phosphate
  modified_base 16: mod_base = OTHER; note = 2'-O-methyladenosine-3'-phosphate
  modified_base 17: mod_base = OTHER; note = 2'-O-methylcytidine-3'-phosphate
  modified_base 18: mod_base = OTHER; note = 2'-O-methyluridine-3'-phosphate
  modified_base 19: mod_base = OTHER; note = 2'-O-methyluridine-3'-phosphorothioate
  modified_base 20: mod_base = OTHER; note = 2'-O-methylguanosine-3'-phosphorothioate
  modified_base 21: mod_base = OTHER; note = 2'-O-methyladenosine
tagagagtggtgatgacttga

SEQ ID NO: 955 - RNA, 21 nt, synthetic construct
  source 1..21: mol_type = other RNA
  modified_base 1: mod_base = OTHER; note = 2'-O-methyladenosine-3'-phosphorothioate
  modified_base 2: mod_base = OTHER; note = 2'-O-methylguanosine-3'-phosphorothioate
  modified_base 3: mod_base = OTHER; note = 2'-O-methyladenosine-3'-phosphate
  modified_base 4: mod_base = OTHER; note = 2'-O-methylguanosine-3'-phosphate
  modified_base 5: mod_base = OTHER; note = 2'-O-methyladenosine-3'-phosphate
  modified_base 6: mod_base = OTHER; note = 2'-O-hexadecyl-guanosine-3'-phosphate
  modified_base 7: mod_base = OTHER; note = 2'-deoxy-2'-fluorouridine-3'-phosphate
  modified_base 8: mod_base = OTHER; note = 2'-O-methylguanosine-3'-phosphate
  modified_base 9: mod_base = OTHER; note = 2'-deoxy-2'-fluoroguanosine-3'-phosphate
  modified_base 10: mod_base = OTHER; note = 2'-deoxy-2'-fluorouridine-3'-phosphate
  modified_base 11: mod_base = OTHER; note = 2'-deoxy-2'-fluoroguanosine-3'-phosphate
  modified_base 12: mod_base = OTHER; note = 2'-O-methyladenosine-3'-phosphate
  modified_base 13: mod_base = OTHER; note = 2'-O-methyluridine-3'-phosphate
  modified_base 14: mod_base = OTHER; note = 2'-O-methylguanosine-3'-phosphate
  modified_base 15: mod_base = OTHER; note = 2'-O-methyladenosine-3'-phosphate
  modified_base 16: mod_base = OTHER; note = 2'-O-methylcytidine-3'-phosphate
  modified_base 17: mod_base = OTHER; note = 2'-O-methyluridine-3'-phosphate
  modified_base 18: mod_base = OTHER; note = 2'-O-methyluridine-3'-phosphate
  modified_base 19: mod_base = OTHER; note = 2'-O-methylguanosine-3'-phosphorothioate
  modified_base 20: mod_base = OTHER; note = 2'-O-methylcytidine-3'-phosphorothioate
  modified_base 21: mod_base = OTHER; note = 2'-O-methyladenosine
agagagtggtgatgacttgca

SEQ ID NO: 956 - RNA, 21 nt, synthetic construct
  source 1..21: mol_type = other RNA
  modified_base 1: mod_base = OTHER; note = 2'-O-methylguanosine-3'-phosphorothioate
  modified_base 2: mod_base = OTHER; note = 2'-O-methyladenosine-3'-phosphorothioate
  modified_base 3: mod_base = OTHER; note = 2'-O-methylguanosine-3'-phosphate
  modified_base 4: mod_base = OTHER; note = 2'-O-methyladenosine-3'-phosphate
  modified_base 5: mod_base = OTHER; note = 2'-O-methylguanosine-3'-phosphate
  modified_base 6: mod_base = OTHER; note = 2'-O-hexadecyl-uridine-3'-phosphate
  modified_base 7: mod_base = OTHER; note = 2'-deoxy-2'-fluoroguanosine-3'-phosphate
  modified_base 8: mod_base = OTHER; note = 2'-O-methylguanosine-3'-phosphate
  modified_base 9: mod_base = OTHER; note = 2'-deoxy-2'-fluorouridine-3'-phosphate
  modified_base 10: mod_base = OTHER; note = 2'-deoxy-2'-fluoroguanosine-3'-phosphate
  modified_base 11: mod_base = OTHER; note = 2'-deoxy-2'-fluoroadenosine-3'-phosphate
  modified_base 12: mod_base = OTHER; note = 2'-O-methyluridine-3'-phosphate
  modified_base 13: mod_base = OTHER; note = 2'-O-methylguanosine-3'-phosphate
  modified_base 14: mod_base = OTHER; note = 2'-O-methyladenosine-3'-phosphate
  modified_base 15: mod_base = OTHER; note = 2'-O-methylcytidine-3'-phosphate
  modified_base 16: mod_base = OTHER; note = 2'-O-methyluridine-3'-phosphate
  modified_base 17: mod_base = OTHER; note = 2'-O-methyluridine-3'-phosphate
  modified_base 18: mod_base = OTHER; note = 2'-O-methylguanosine-3'-phosphate
  modified_base 19: mod_base = OTHER; note = 2'-O-methylcytidine-3'-phosphorothioate
  modified_base 20: mod_base = OTHER; note = 2'-O-methyladenosine-3'-phosphorothioate
  modified_base 21: mod_base = OTHER; note = 2'-O-methyladenosine
gagagtggtgatgacttgcaa

SEQ ID NO: 957 - RNA, 21 nt, synthetic construct
  source 1..21: mol_type = other RNA
  modified_base 1: mod_base = OTHER; note = 2'-O-methyladenosine-3'-phosphorothioate
  modified_base 2: mod_base = OTHER; note = 2'-O-methylguanosine-3'-phosphorothioate
  modified_base 3: mod_base = OTHER; note = 2'-O-methyluridine-3'-phosphate
  modified_base 4: mod_base = OTHER; note = 2'-O-methylguanosine-3'-phosphate
  modified_base 5: mod_base = OTHER; note = 2'-O-methylguanosine-3'-phosphate
  modified_base 6: mod_base = OTHER; note = 2'-O-hexadecyl-uridine-3'-phosphate
  modified_base 7: mod_base = OTHER; note = 2'-deoxy-2'-fluoroguanosine-3'-phosphate
  modified_base 8: mod_base = OTHER; note = 2'-O-methyladenosine-3'-phosphate
  modified_base 9: mod_base = OTHER; note = 2'-deoxy-2'-fluorouridine-3'-phosphate
  modified_base 10: mod_base = OTHER; note = 2'-deoxy-2'-fluoroguanosine-3'-phosphate
  modified_base 11: mod_base = OTHER; note = 2'-deoxy-2'-fluoroadenosine-3'-phosphate
  modified_base 12: mod_base = OTHER; note = 2'-O-methylcytidine-3'-phosphate
  modified_base 13: mod_base = OTHER; note = 2'-O-methyluridine-3'-phosphate
  modified_base 14: mod_base = OTHER; note = 2'-O-methyluridine-3'-phosphate
  modified_base 15: mod_base = OTHER; note = 2'-O-methylguanosine-3'-phosphate
  modified_base 16: mod_base = OTHER; note = 2'-O-methylcytidine-3'-phosphate
  modified_base 17: mod_base = OTHER; note = 2'-O-methyladenosine-3'-phosphate
  modified_base 18: mod_base = OTHER; note = 2'-O-methyluridine-3'-phosphate
  modified_base 19: mod_base = OTHER; note = 2'-O-methyladenosine-3'-phosphorothioate
  modified_base 20: mod_base = OTHER; note = 2'-O-methyluridine-3'-phosphorothioate
  modified_base 21: mod_base = OTHER; note = 2'-O-methyladenosine
agtggtgatgacttgcatata

SEQ ID NO: 958 - RNA, 21 nt, synthetic construct
  source 1..21: mol_type = other RNA
  modified_base 1: mod_base = OTHER; note = 2'-O-methylguanosine-3'-phosphorothioate
  modified_base 2: mod_base = OTHER; note = 2'-O-methylguanosine-3'-phosphorothioate
  modified_base 3: mod_base = OTHER; note = 2'-O-methyluridine-3'-phosphate
  modified_base 4: mod_base = OTHER; note = 2'-O-methylguanosine-3'-phosphate
  modified_base 5: mod_base = OTHER; note = 2'-O-methyladenosine-3'-phosphate
  modified_base 6: mod_base = OTHER; note = 2'-O-hexadecyl-uridine-3'-phosphate
  modified_base 7: mod_base = OTHER; note = 2'-deoxy-2'-fluoroguanosine-3'-phosphate
  modified_base 8: mod_base = OTHER; note = 2'-O-methyladenosine-3'-phosphate
  modified_base 9: mod_base = OTHER; note = 2'-deoxy-2'-fluorocytidine-3'-phosphate
  modified_base 10: mod_base = OTHER; note = 2'-deoxy-2'-fluorouridine-3'-phosphate
  modified_base 11: mod_base = OTHER; note = 2'-deoxy-2'-fluorouridine-3'-phosphate
  modified_base 12: mod_base = OTHER; note = 2'-O-methylguanosine-3'-phosphate
  modified_base 13: mod_base = OTHER; note = 2'-O-methylcytidine-3'-phosphate
  modified_base 14: mod_base = OTHER; note = 2'-O-methyladenosine-3'-phosphate
  modified_base 15: mod_base = OTHER; note = 2'-O-methyluridine-3'-phosphate
  modified_base 16: mod_base = OTHER; note = 2'-O-methyladenosine-3'-phosphate
  modified_base 17: mod_base = OTHER; note = 2'-O-methyluridine-3'-phosphate
  modified_base 18: mod_base = OTHER; note = 2'-O-methylguanosine-3'-phosphate
  modified_base 19: mod_base = OTHER; note = 2'-O-methyladenosine-3'-phosphorothioate
  modified_base 20: mod_base = OTHER; note = 2'-O-methylguanosine-3'-phosphorothioate
  modified_base 21: mod_base = OTHER; note = 2'-O-methyladenosine
ggtgatgacttgcatatgaga

SEQ ID NO: 959 - RNA, 21 nt, synthetic construct
  source 1..21: mol_type = other RNA
  modified_base 1: mod_base = OTHER; note = 2'-O-methylguanosine-3'-phosphorothioate
  modified_base 2: mod_base = OTHER; note = 2'-O-methyluridine-3'-phosphorothioate
  modified_base 3: mod_base = OTHER; note = 2'-O-methylguanosine-3'-phosphate
  modified_base 4: mod_base = OTHER; note = 2'-O-methyladenosine-3'-phosphate
  modified_base 5: mod_base = OTHER; note = 2'-O-methyluridine-3'-phosphate
  modified_base 6: mod_base = OTHER; note = 2'-O-hexadecyl-guanosine-3'-phosphate
  modified_base 7: mod_base = OTHER; note = 2'-deoxy-2'-fluoroadenosine-3'-phosphate
  modified_base 8: mod_base = OTHER; note = 2'-O-methylcytidine-3'-phosphate
  modified_base 9: mod_base = OTHER; note = 2'-deoxy-2'-fluorouridine-3'-phosphate
  modified_base 10: mod_base = OTHER; note = 2'-deoxy-2'-fluorouridine-3'-phosphate
  modified_base 11: mod_base = OTHER; note = 2'-deoxy-2'-fluoroguanosine-3'-phosphate
  modified_base 12: mod_base = OTHER; note = 2'-O-methylcytidine-3'-phosphate
  modified_base 13: mod_base = OTHER; note = 2'-O-methyladenosine-3'-phosphate
  modified_base 14: mod_base = OTHER; note = 2'-O-methyluridine-3'-phosphate
  modified_base 15: mod_base = OTHER; note = 2'-O-methyladenosine-3'-phosphate
  modified_base 16: mod_base = OTHER; note = 2'-O-methyluridine-3'-phosphate
  modified_base 17: mod_base = OTHER; note = 2'-O-methylguanosine-3'-phosphate
  modified_base 18: mod_base = OTHER; note = 2'-O-methyladenosine-3'-phosphate
  modified_base 19: mod_base = OTHER; note = 2'-O-methylguanosine-3'-phosphorothioate
  modified_base 20: mod_base = OTHER; note = 2'-O-methylguanosine-3'-phosphorothioate
  modified_base 21: mod_base = OTHER; note = 2'-O-methyladenosine
gtgatgacttgcatatgagga

SEQ ID NO: 960 - RNA, 21 nt, synthetic construct
  source 1..21: mol_type = other RNA
  modified_base 1: mod_base = OTHER; note = 2'-O-methyluridine-3'-phosphorothioate
  modified_base 2: mod_base = OTHER; note = 2'-O-methylguanosine-3'-phosphorothioate
  modified_base 3: mod_base = OTHER; note = 2'-O-methyladenosine-3'-phosphate
  modified_base 4: mod_base = OTHER; note = 2'-O-methyluridine-3'-phosphate
  modified_base 5: mod_base = OTHER; note = 2'-O-methylguanosine-3'-phosphate
  modified_base 6: mod_base = OTHER; note = 2'-O-hexadecyl-adenosine-3'-phosphate
  modified_base 7: mod_base = OTHER; note = 2'-deoxy-2'-fluorocytidine-3'-phosphate
  modified_base 8: mod_base = OTHER; note = 2'-O-methyluridine-3'-phosphate
  modified_base 9: mod_base = OTHER; note = 2'-deoxy-2'-fluorouridine-3'-phosphate
  modified_base 10: mod_base = OTHER; note = 2'-deoxy-2'-fluoroguanosine-3'-phosphate
  modified_base 11: mod_base = OTHER; note = 2'-deoxy-2'-fluorocytidine-3'-phosphate
  modified_base 12: mod_base = OTHER; note = 2'-O-methyladenosine-3'-phosphate
  modified_base 13: mod_base = OTHER; note = 2'-O-methyluridine-3'-phosphate
  modified_base 14: mod_base = OTHER; note = 2'-O-methyladenosine-3'-phosphate
  modified_base 15: mod_base = OTHER; note = 2'-O-methyluridine-3'-phosphate
  modified_base 16: mod_base = OTHER; note = 2'-O-methylguanosine-3'-phosphate
  modified_base 17: mod_base = OTHER; note = 2'-O-methyladenosine-3'-phosphate
  modified_base 18: mod_base = OTHER; note = 2'-O-methylguanosine-3'-phosphate
  modified_base 19: mod_base = OTHER; note = 2'-O-methylguanosine-3'-phosphorothioate
  modified_base 20: mod_base = OTHER; note = 2'-O-methylguanosine-3'-phosphorothioate
  modified_base 21: mod_base = OTHER; note = 2'-O-methyladenosine
tgatgacttgcatatgaggga

SEQ ID NO: 961 - RNA, 21 nt, synthetic construct
  source 1..21: mol_type = other RNA
  modified_base 1: mod_base = OTHER; note = 2'-O-methyladenosine-3'-phosphorothioate
  modified_base 2: mod_base = OTHER; note = 2'-O-methylguanosine-3'-phosphorothioate
  modified_base 3: mod_base = OTHER; note = 2'-O-methylguanosine-3'-phosphate
  modified_base 4: mod_base = OTHER; note = 2'-O-methylguanosine-3'-phosphate
  modified_base 5: mod_base = OTHER; note = 2'-O-methylcytidine-3'-phosphate
  modified_base 6: mod_base = OTHER; note = 2'-O-hexadecyl-adenosine-3'-phosphate
  modified_base 7: mod_base = OTHER; note = 2'-deoxy-2'-fluoroguanosine-3'-phosphate
  modified_base 8: mod_base = OTHER; note = 2'-O-methylcytidine-3'-phosphate
  modified_base 9: mod_base = OTHER; note = 2'-deoxy-2'-fluoroadenosine-3'-phosphate
  modified_base 10: mod_base = OTHER; note = 2'-deoxy-2'-fluoroadenosine-3'-phosphate
  modified_base 11: mod_base = OTHER; note = 2'-deoxy-2'-fluorouridine-3'-phosphate
  modified_base 12: mod_base = OTHER; note = 2'-O-methylguanosine-3'-phosphate
  modified_base 13: mod_base = OTHER; note = 2'-O-methylcytidine-3'-phosphate
  modified_base 14: mod_base = OTHER; note = 2'-O-methyladenosine-3'-phosphate
  modified_base 15: mod_base = OTHER; note = 2'-O-methyladenosine-3'-phosphate
  modified_base 16: mod_base = OTHER; note = 2'-O-methylguanosine-3'-phosphate
  modified_base 17: mod_base = OTHER; note = 2'-O-methyluridine-3'-phosphate
  modified_base 18: mod_base = OTHER; note = 2'-O-methylcytidine-3'-phosphate
  modified_base 19: mod_base = OTHER; note = 2'-O-methylguanosine-3'-phosphorothioate
  modified_base 20: mod_base = OTHER; note = 2'-O-methylguanosine-3'-phosphorothioate
  modified_base 21: mod_base = OTHER; note = 2'-O-methyladenosine
agggcagcaatgcaagtcgga

SEQ ID NO: 962 - RNA, 21 nt, synthetic construct
  source 1..21: mol_type = other RNA
  modified_base 1: mod_base = OTHER; note = 2'-O-methylguanosine-3'-phosphorothioate
  modified_base 2: mod_base = OTHER; note = 2'-O-methylguanosine-3'-phosphorothioate
  modified_base 3: mod_base = OTHER; note = 2'-O-methylguanosine-3'-phosphate
  modified_base 4: mod_base = OTHER; note = 2'-O-methylcytidine-3'-phosphate
  modified_base 5: mod_base = OTHER; note = 2'-O-methyladenosine-3'-phosphate
  modified_base 6: mod_base = OTHER; note = 2'-O-hexadecyl-guanosine-3'-phosphate
  modified_base 7: mod_base = OTHER; note = 2'-deoxy-2'-fluorocytidine-3'-phosphate
  modified_base 8: mod_base = OTHER; note = 2'-O-methyladenosine-3'-phosphate
  modified_base 9: mod_base = OTHER; note = 2'-deoxy-2'-fluoroadenosine-3'-phosphate
  modified_base 10: mod_base = OTHER; note = 2'-deoxy-2'-fluorouridine-3'-phosphate
  modified_base 11: mod_base = OTHER; note = 2'-deoxy-2'-fluoroguanosine-3'-phosphate
  modified_base 12: mod_base = OTHER; note = 2'-O-methylcytidine-3'-phosphate
  modified_base 13: mod_base = OTHER; note = 2'-O-methyladenosine-3'-phosphate
  modified_base 14: mod_base = OTHER; note = 2'-O-methyladenosine-3'-phosphate
  modified_base 15: mod_base = OTHER; note = 2'-O-methylguanosine-3'-phosphate
  modified_base 16: mod_base = OTHER; note = 2'-O-methyluridine-3'-phosphate
  modified_base 17: mod_base = OTHER; note = 2'-O-methylcytidine-3'-phosphate
  modified_base 18: mod_base = OTHER; note = 2'-O-methylguanosine-3'-phosphate
  modified_base 19: mod_base = OTHER; note = 2'-O-methylguanosine-3'-phosphorothioate
  modified_base 20: mod_base = OTHER; note = 2'-O-methyluridine-3'-phosphorothioate
  modified_base 21: mod_base = OTHER; note = 2'-O-methyladenosine
gggcagcaatgcaagtcggta

SEQ ID NO: 963 - RNA, 21 nt, synthetic construct
  source 1..21: mol_type = other RNA
  modified_base 1: mod_base = OTHER; note = 2'-O-methylguanosine-3'-phosphorothioate
  modified_base 2: mod_base = OTHER; note = 2'-O-methylguanosine-3'-phosphorothioate
  modified_base 3: mod_base = OTHER; note = 2'-O-methylcytidine-3'-phosphate
  modified_base 4: mod_base = OTHER; note = 2'-O-methyladenosine-3'-phosphate
  modified_base 5: mod_base = OTHER; note = 2'-O-methylguanosine-3'-phosphate
  modified_base 6: mod_base = OTHER; note = 2'-O-hexadecyl-cytidine-3'-phosphate
  modified_base 7: mod_base = OTHER; note = 2'-deoxy-2'-fluoroadenosine-3'-phosphate
  modified_base 8: mod_base = OTHER; note = 2'-O-methyladenosine-3'-phosphate
  modified_base 9: mod_base = OTHER; note = 2'-deoxy-2'-fluorouridine-3'-phosphate
  modified_base 10: mod_base = OTHER; note = 2'-deoxy-2'-fluoroguanosine-3'-phosphate
  modified_base 11: mod_base = OTHER; note = 2'-deoxy-2'-fluorocytidine-3'-phosphate
  modified_base 12: mod_base = OTHER; note = 2'-O-methyladenosine-3'-phosphate
  modified_base 13: mod_base = OTHER; note = 2'-O-methyladenosine-3'-phosphate
  modified_base 14: mod_base = OTHER; note = 2'-O-methylguanosine-3'-phosphate
  modified_base 15: mod_base = OTHER; note = 2'-O-methyluridine-3'-phosphate
  modified_base 16: mod_base = OTHER; note = 2'-O-methylcytidine-3'-phosphate
  modified_base 17: mod_base = OTHER; note = 2'-O-methylguanosine-3'-phosphate
  modified_base 18: mod_base = OTHER; note = 2'-O-methylguanosine-3'-phosphate
  modified_base 19: mod_base = OTHER; note = 2'-O-methyluridine-3'-phosphorothioate
  modified_base 20: mod_base = OTHER; note = 2'-O-methylguanosine-3'-phosphorothioate
  modified_base 21: mod_base = OTHER; note = 2'-O-methyladenosine
ggcagcaatgcaagtcggtga

SEQ ID NO: 964 - RNA, 21 nt, synthetic construct
  source 1..21: mol_type = other RNA
  modified_base 1: mod_base = OTHER; note = 2'-O-methylguanosine-3'-phosphorothioate
  modified_base 2: mod_base = OTHER; note = 2'-O-methylcytidine-3'-phosphorothioate
  modified_base 3: mod_base = OTHER; note = 2'-O-methyladenosine-3'-phosphate
  modified_base 4: mod_base = OTHER; note = 2'-O-methylguanosine-3'-phosphate
  modified_base 5: mod_base = OTHER; note = 2'-O-methylcytidine-3'-phosphate
  modified_base 6: mod_base = OTHER; note = 2'-O-hexadecyl-adenosine-3'-phosphate
  modified_base 7: mod_base = OTHER; note = 2'-deoxy-2'-fluoroadenosine-3'-phosphate
  modified_base 8: mod_base = OTHER; note = 2'-O-methyluridine-3'-phosphate
  modified_base 9: mod_base = OTHER; note = 2'-deoxy-2'-fluoroguanosine-3'-phosphate
  modified_base 10: mod_base = OTHER; note = 2'-deoxy-2'-fluorocytidine-3'-phosphate
  modified_base 11: mod_base = OTHER; note = 2'-deoxy-2'-fluoroadenosine-3'-phosphate
  modified_base 12: mod_base = OTHER; note = 2'-O-methyladenosine-3'-phosphate
  modified_base 13: mod_base = OTHER; note = 2'-O-methylguanosine-3'-phosphate
  modified_base 14: mod_base = OTHER; note = 2'-O-methyluridine-3'-phosphate
  modified_base 15: mod_base = OTHER; note = 2'-O-methylcytidine-3'-phosphate
  modified_base 16: mod_base = OTHER; note = 2'-O-methylguanosine-3'-phosphate
  modified_base 17: mod_base = OTHER; note = 2'-O-methylguanosine-3'-phosphate
  modified_base 18: mod_base = OTHER; note = 2'-O-methyluridine-3'-phosphate
  modified_base 19: mod_base = OTHER; note = 2'-O-methylguanosine-3'-phosphorothioate
  modified_base 20: mod_base = OTHER; note = 2'-O-methyluridine-3'-phosphorothioate
  modified_base 21: mod_base = OTHER; note = 2'-O-methyladenosine
gcagcaatgcaagtcggtgta

SEQ ID NO: 965 - RNA, 21 nt, synthetic construct
  source 1..21: mol_type = other RNA
  modified_base 1: mod_base = OTHER; note = 2'-O-methylcytidine-3'-phosphorothioate
  modified_base 2: mod_base = OTHER; note = 2'-O-methyladenosine-3'-phosphorothioate
  modified_base 3: mod_base = OTHER; note = 2'-O-methylguanosine-3'-phosphate
  modified_base 4: mod_base = OTHER; note = 2'-O-methylcytidine-3'-phosphate
  modified_base 5: mod_base = OTHER; note = 2'-O-methyladenosine-3'-phosphate
  modified_base 6: mod_base = OTHER; note = 2'-O-hexadecyl-adenosine-3'-phosphate
  modified_base 7: mod_base = OTHER; note = 2'-deoxy-2'-fluorouridine-3'-phosphate
  modified_base 8: mod_base = OTHER; note = 2'-O-methylguanosine-3'-phosphate
  modified_base 9: mod_base = OTHER; note = 2'-deoxy-2'-fluorocytidine-3'-phosphate
  modified_base 10: mod_base = OTHER; note = 2'-deoxy-2'-fluoroadenosine-3'-phosphate
  modified_base 11: mod_base = OTHER; note = 2'-deoxy-2'-fluoroadenosine-3'-phosphate
  modified_base 12: mod_base = OTHER; note = 2'-O-methylguanosine-3'-phosphate
  modified_base 13: mod_base = OTHER; note = 2'-O-methyluridine-3'-phosphate
  modified_base 14: mod_base = OTHER; note = 2'-O-methylcytidine-3'-phosphate
  modified_base 15: mod_base = OTHER; note = 2'-O-methylguanosine-3'-phosphate
  modified_base 16: mod_base = OTHER; note = 2'-O-methylguanosine-3'-phosphate
  modified_base 17: mod_base = OTHER; note = 2'-O-methyluridine-3'-phosphate
  modified_base 18: mod_base = OTHER; note = 2'-O-methylguanosine-3'-phosphate
  modified_base 19: mod_base = OTHER; note = 2'-O-methyluridine-3'-phosphorothioate
  modified_base 20: mod_base = OTHER; note = 2'-O-methylguanosine-3'-phosphorothioate
  modified_base 21: mod_base = OTHER; note = 2'-O-methyladenosine
cagcaatgcaagtcggtgtga

SEQ ID NO: 966 - RNA, 21 nt, synthetic construct
  source 1..21: mol_type = other RNA
  modified_base 1: mod_base = OTHER; note = 2'-O-methylcytidine-3'-phosphorothioate
  modified_base 2: mod_base = OTHER; note = 2'-O-methyladenosine-3'-phosphorothioate
  modified_base 3: mod_base = OTHER; note = 2'-O-methyladenosine-3'-phosphate
  modified_base 4: mod_base = OTHER; note = 2'-O-methyluridine-3'-phosphate
  modified_base 5: mod_base = OTHER; note = 2'-O-methylguanosine-3'-phosphate
  modified_base 6: mod_base = OTHER; note = 2'-O-hexadecyl-cytidine-3'-phosphate
  modified_base 7: mod_base = OTHER; note = 2'-deoxy-2'-fluoroadenosine-3'-phosphate
  modified_base 8: mod_base = OTHER; note = 2'-O-methyladenosine-3'-phosphate
  modified_base 9: mod_base = OTHER; note = 2'-deoxy-2'-fluoroguanosine-3'-phosphate
  modified_base 10: mod_base = OTHER; note = 2'-deoxy-2'-fluorouridine-3'-phosphate
  modified_base 11: mod_base = OTHER; note = 2'-deoxy-2'-fluorocytidine-3'-phosphate
  modified_base 12: mod_base = OTHER; note = 2'-O-methylguanosine-3'-phosphate
  modified_base 13: mod_base = OTHER; note = 2'-O-methylguanosine-3'-phosphate
  modified_base 14: mod_base = OTHER; note = 2'-O-methyluridine-3'-phosphate
  modified_base 15: mod_base = OTHER; note = 2'-O-methylguanosine-3'-phosphate
  modified_base 16: mod_base = OTHER; note = 2'-O-methyluridine-3'-phosphate
  modified_base 17: mod_base = OTHER; note = 2'-O-methylguanosine-3'-phosphate
  modified_base 18: mod_base = OTHER; note = 2'-O-methylcytidine-3'-phosphate
  modified_base 19: mod_base = OTHER; note = 2'-O-methyluridine-3'-phosphorothioate
  modified_base 20: mod_base = OTHER; note = 2'-O-methylcytidine-3'-phosphorothioate
  modified_base 21: mod_base = OTHER; note = 2'-O-methyladenosine
caatgcaagtcggtgtgctca

SEQ ID NO: 967 - RNA, 21 nt, synthetic construct
  source 1..21: mol_type = other RNA
  modified_base 1: mod_base = OTHER; note = 2'-O-methylcytidine-3'-phosphorothioate
  modified_base 2: mod_base = OTHER; note = 2'-O-methyluridine-3'-phosphorothioate
  modified_base 3: mod_base = OTHER; note = 2'-O-methylguanosine-3'-phosphate
  modified_base 4: mod_base = OTHER; note = 2'-O-methyluridine-3'-phosphate
  modified_base 5: mod_base = OTHER; note = 2'-O-methylguanosine-3'-phosphate
  modified_base 6: mod_base = OTHER; note = 2'-O-hexadecyl-guanosine-3'-phosphate
  modified_base 7: mod_base = OTHER; note = 2'-deoxy-2'-fluoroguanosine-3'-phosphate
  modified_base 8: mod_base = OTHER; note = 2'-O-methyladenosine-3'-phosphate
  modified_base 9: mod_base = OTHER; note = 2'-deoxy-2'-fluorocytidine-3'-phosphate
  modified_base 10: mod_base = OTHER; note = 2'-deoxy-2'-fluoroadenosine-3'-phosphate
  modified_base 11: mod_base = OTHER; note = 2'-deoxy-2'-fluorouridine-3'-phosphate
  modified_base 12: mod_base = OTHER; note = 2'-O-methylguanosine-3'-phosphate
  modified_base 13: mod_base = OTHER; note = 2'-O-methyladenosine-3'-phosphate
  modified_base 14: mod_base = OTHER; note = 2'-O-methylcytidine-3'-phosphate
  modified_base 15: mod_base = OTHER; note = 2'-O-methylcytidine-3'-phosphate
  modified_base 16: mod_base = OTHER; note = 2'-O-methyluridine-3'-phosphate
  modified_base 17: mod_base = OTHER; note = 2'-O-methylguanosine-3'-phosphate
  modified_base 18: mod_base = OTHER; note = 2'-O-methylguanosine-3'-phosphate
  modified_base 19: mod_base = OTHER; note = 2'-O-methyluridine-3'-phosphorothioate
  modified_base 20: mod_base = OTHER; note = 2'-O-methyluridine-3'-phosphorothioate
  modified_base 21: mod_base = OTHER; note = 2'-O-methyladenosine
ctgtgggacatgacctggtta

SEQ ID NO: 968 - RNA, 21 nt, synthetic construct
  source 1..21: mol_type = other RNA
  modified_base 1: mod_base = OTHER; note = 2'-O-methyluridine-3'-phosphorothioate
  modified_base 2: mod_base = OTHER; note = 2'-O-methylguanosine-3'-phosphorothioate
  modified_base 3: mod_base = OTHER; note = 2'-O-methyluridine-3'-phosphate
  modified_base 4: mod_base = OTHER; note = 2'-O-methylguanosine-3'-phosphate
  modified_base 5: mod_base = OTHER; note = 2'-O-methylguanosine-3'-phosphate
  modified_base 6: mod_base = OTHER; note = 2'-O-hexadecyl-guanosine-3'-phosphate
  modified_base 7: mod_base = OTHER; note = 2'-deoxy-2'-fluoroadenosine-3'-phosphate
  modified_base 8: mod_base = OTHER; note = 2'-O-methylcytidine-3'-phosphate
  modified_base 9: mod_base = OTHER; note = 2'-deoxy-2'-fluoroadenosine-3'-phosphate
  modified_base 10: mod_base = OTHER; note = 2'-deoxy-2'-fluorouridine-3'-phosphate
  modified_base 11: mod_base = OTHER; note = 2'-deoxy-2'-fluoroguanosine-3'-phosphate
  modified_base 12: mod_base = OTHER; note = 2'-O-methyladenosine-3'-phosphate
  modified_base 13: mod_base = OTHER; note = 2'-O-methylcytidine-3'-phosphate
  modified_base 14: mod_base = OTHER; note = 2'-O-methylcytidine-3'-phosphate
  modified_base 15: mod_base = OTHER; note = 2'-O-methyluridine-3'-phosphate
  modified_base 16: mod_base = OTHER; note = 2'-O-methylguanosine-3'-phosphate
  modified_base 17: mod_base = OTHER; note = 2'-O-methylguanosine-3'-phosphate
  modified_base 18: mod_base = OTHER; note = 2'-O-methyluridine-3'-phosphate
  modified_base 19: mod_base = OTHER; note = 2'-O-methyluridine-3'-phosphorothioate
  modified_base 20: mod_base = OTHER; note = 2'-O-methylguanosine-3'-phosphorothioate
  modified_base 21: mod_base = OTHER; note = 2'-O-methyladenosine
tgtgggacatgacctggttga

SEQ ID NO: 969 - RNA, 21 nt, synthetic construct
  source 1..21: mol_type = other RNA
  modified_base 1: mod_base = OTHER; note = 2'-O-methylguanosine-3'-phosphorothioate
  modified_base 2: mod_base = OTHER; note = 2'-O-methyluridine-3'-phosphorothioate
  modified_base 3: mod_base = OTHER; note = 2'-O-methylguanosine-3'-phosphate
  modified_base 4: mod_base = OTHER; note = 2'-O-methylguanosine-3'-phosphate
  modified_base 5: mod_base = OTHER; note = 2'-O-methylguanosine-3'-phosphate
  modified_base 6: mod_base = OTHER; note = 2'-O-hexadecyl-adenosine-3'-phosphate
  modified_base 7: mod_base = OTHER; note = 2'-deoxy-2'-fluorocytidine-3'-phosphate
  modified_base 8: mod_base = OTHER; note = 2'-O-methyladenosine-3'-phosphate
  modified_base 9: mod_base = OTHER; note = 2'-deoxy-2'-fluorouridine-3'-phosphate
  modified_base 10: mod_base = OTHER; note = 2'-deoxy-2'-fluoroguanosine-3'-phosphate
  modified_base 11: mod_base = OTHER; note = 2'-deoxy-2'-fluoroadenosine-3'-phosphate
  modified_base 12: mod_base = OTHER; note = 2'-O-methylcytidine-3'-phosphate
  modified_base 13: mod_base = OTHER; note = 2'-O-methylcytidine-3'-phosphate
  modified_base 14: mod_base = OTHER; note = 2'-O-methyluridine-3'-phosphate
  modified_base 15: mod_base = OTHER; note = 2'-O-methylguanosine-3'-phosphate
  modified_base 16: mod_base = OTHER; note = 2'-O-methylguanosine-3'-phosphate
  modified_base 17: mod_base = OTHER; note = 2'-O-methyluridine-3'-phosphate
  modified_base 18: mod_base = OTHER; note = 2'-O-methyluridine-3'-phosphate
  modified_base 19: mod_base = OTHER; note = 2'-O-methylguanosine-3'-phosphorothioate
  modified_base 20: mod_base = OTHER; note = 2'-O-methylcytidine-3'-phosphorothioate
  modified_base 21: mod_base = OTHER; note = 2'-O-methyladenosine
gtgggacatgacctggttgca

SEQ ID NO: 970 - RNA, 21 nt, synthetic construct
  source 1..21: mol_type = other RNA
  modified_base 1: mod_base = OTHER; note = 2'-O-methyluridine-3'-phosphorothioate
  modified_base 2: mod_base = OTHER; note = 2'-O-methylguanosine-3'-phosphorothioate
  modified_base 3: mod_base = OTHER; note = 2'-O-methylguanosine-3'-phosphate
  modified_base 4: mod_base = OTHER; note = 2'-O-methylguanosine-3'-phosphate
  modified_base 5: mod_base = OTHER; note = 2'-O-methyladenosine-3'-phosphate
  modified_base 6: mod_base = OTHER; note = 2'-O-hexadecyl-cytidine-3'-phosphate
  modified_base 7: mod_base = OTHER; note = 2'-deoxy-2'-fluoroadenosine-3'-phosphate
  modified_base 8: mod_base = OTHER; note = 2'-O-methyluridine-3'-phosphate
  modified_base 9: mod_base = OTHER; note = 2'-deoxy-2'-fluoroguanosine-3'-phosphate
  modified_base 10: mod_base = OTHER; note = 2'-deoxy-2'-fluoroadenosine-3'-phosphate
  modified_base 11: mod_base = OTHER; note = 2'-deoxy-2'-fluorocytidine-3'-phosphate
  modified_base 12: mod_base = OTHER; note = 2'-O-methylcytidine-3'-phosphate
  modified_base 13: mod_base = OTHER; note = 2'-O-methyluridine-3'-phosphate
  modified_base 14: mod_base = OTHER; note = 2'-O-methylguanosine-3'-phosphate
  modified_base 15: mod_base = OTHER; note = 2'-O-methylguanosine-3'-phosphate
  modified_base 16: mod_base = OTHER; note = 2'-O-methyluridine-3'-phosphate
  modified_base 17: mod_base = OTHER; note = 2'-O-methyluridine-3'-phosphate
  modified_base 18: mod_base = OTHER; note = 2'-O-methylguanosine-3'-phosphate
  modified_base 19: mod_base = OTHER; note = 2'-O-methylcytidine-3'-phosphorothioate
  modified_base 20: mod_base = OTHER; note = 2'-O-methyluridine-3'-phosphorothioate
  modified_base 21: mod_base = OTHER; note = 2'-O-methyladenosine
tgggacatgacctggttgcta

SEQ ID NO: 971 - RNA, 21 nt, synthetic construct
  source 1..21: mol_type = other RNA
  modified_base 1: mod_base = OTHER; note = 2'-O-methylguanosine-3'-phosphorothioate
  modified_base 2: mod_base = OTHER; note = 2'-O-methyladenosine-3'-phosphorothioate
  modified_base 3: mod_base = OTHER; note = 2'-O-methylcytidine-3'-phosphate
  modified_base 4: mod_base = OTHER; note = 2'-O-methyladenosine-3'-phosphate
  modified_base 5: mod_base = OTHER; note = 2'-O-methyluridine-3'-phosphate
  modified_base 6: mod_base = OTHER; note = 2'-O-hexadecyl-guanosine-3'-phosphate
  modified_base 7: mod_base = OTHER; note = 2'-deoxy-2'-fluoroadenosine-3'-phosphate
  modified_base 8: mod_base = OTHER; note = 2'-O-methylcytidine-3'-phosphate
  modified_base 9: mod_base = OTHER; note = 2'-deoxy-2'-fluorocytidine-3'-phosphate
  modified_base 10: mod_base = OTHER; note = 2'-deoxy-2'-fluorouridine-3'-phosphate
  modified_base 11: mod_base = OTHER; note = 2'-deoxy-2'-fluoroguanosine-3'-phosphate
  modified_base 12: mod_base = OTHER; note = 2'-O-methylguanosine-3'-phosphate
  modified_base 13: mod_base = OTHER; note = 2'-O-methyluridine-3'-phosphate
  modified_base 14: mod_base = OTHER; note = 2'-O-methyluridine-3'-phosphate
  modified_base 15: mod_base = OTHER; note = 2'-O-methylguanosine-3'-phosphate
  modified_base 16: mod_base = OTHER; note = 2'-O-methylcytidine-3'-phosphate
  modified_base 17: mod_base = OTHER; note = 2'-O-methyluridine-3'-phosphate
  modified_base 18: mod_base = OTHER; note = 2'-O-methyluridine-3'-phosphate
  modified_base 19: mod_base = OTHER; note = 2'-O-methylcytidine-3'-phosphorothioate
  modified_base 20: mod_base = OTHER; note = 2'-O-methyladenosine-3'-phosphorothioate
  modified_base 21: mod_base = OTHER; note = 2'-O-methyladenosine
gacatgacctggttgcttcaa

SEQ ID NO: 972 - RNA, 21 nt, synthetic construct
  source 1..21: mol_type = other RNA
  modified_base 1: mod_base = OTHER; note = 2'-O-methyladenosine-3'-phosphorothioate
  modified_base 2: mod_base = OTHER; note = 2'-O-methylcytidine-3'-phosphorothioate
  modified_base 3: mod_base = OTHER; note = 2'-O-methyladenosine-3'-phosphate
  modified_base 4: mod_base = OTHER; note = 2'-O-methyluridine-3'-phosphate
  modified_base 5: mod_base = OTHER; note = 2'-O-methylguanosine-3'-phosphate
  modified_base 6: mod_base = OTHER; note = 2'-O-hexadecyl-adenosine-3'-phosphate
  modified_base 7: mod_base = OTHER; note = 2'-deoxy-2'-fluorocytidine-3'-phosphate
  modified_base 8: mod_base = OTHER; note = 2'-O-methylcytidine-3'-phosphate
  modified_base 9: mod_base = OTHER; note = 2'-deoxy-2'-fluorouridine-3'-phosphate
  modified_base 10: mod_base = OTHER; note = 2'-deoxy-2'-fluoroguanosine-3'-phosphate
  modified_base 11: mod_base = OTHER; note = 2'-deoxy-2'-fluoroguanosine-3'-phosphate
  modified_base 12: mod_base = OTHER; note = 2'-O-methyluridine-3'-phosphate
  modified_base 13: mod_base = OTHER; note = 2'-O-methyluridine-3'-phosphate
  modified_base 14: mod_base = OTHER; note = 2'-O-methylguanosine-3'-phosphate
  modified_base 15: mod_base = OTHER; note = 2'-O-methylcytidine-3'-phosphate
  modified_base 16: mod_base = OTHER; note = 2'-O-methyluridine-3'-phosphate
  modified_base 17: mod_base = OTHER; note = 2'-O-methyluridine-3'-phosphate
  modified_base 18: mod_base = OTHER; note = 2'-O-methylcytidine-3'-phosphate
  modified_base 19: mod_base = OTHER; note = 2'-O-methyladenosine-3'-phosphorothioate
  modified_base 20: mod_base = OTHER; note = 2'-O-methylcytidine-3'-phosphorothioate
  modified_base 21: mod_base = OTHER; note = 2'-O-methyladenosine
acatgacctggttgcttcaca

SEQ ID NO: 973 - RNA, 21 nt, synthetic construct
  source 1..21: mol_type = other RNA
  modified_base 1: mod_base = OTHER; note = 2'-O-methyluridine-3'-phosphorothioate
  modified_base 2: mod_base = OTHER; note = 2'-O-methylguanosine-3'-phosphorothioate
  modified_base 3: mod_base = OTHER; note = 2'-O-methyladenosine-3'-phosphate
  modified_base 4: mod_base = OTHER; note = 2'-O-methylcytidine-3'-phosphate
  modified_base 5: mod_base = OTHER; note = 2'-O-methylcytidine-3'-phosphate
  modified_base 6: mod_base = OTHER; note = 2'-O-hexadecyl-uridine-3'-phosphate
  modified_base 7: mod_base = OTHER; note = 2'-deoxy-2'-fluoroguanosine-3'-phosphate
  modified_base 8: mod_base = OTHER; note = 2'-O-methylguanosine-3'-phosphate
  modified_base 9: mod_base = OTHER; note = 2'-deoxy-2'-fluorouridine-3'-phosphate
  modified_base 10: mod_base = OTHER; note = 2'-deoxy-2'-fluorouridine-3'-phosphate
  modified_base 11: mod_base = OTHER; note = 2'-deoxy-2'-fluoroguanosine-3'-phosphate
  modified_base 12: mod_base = OTHER; note = 2'-O-methylcytidine-3'-phosphate
  modified_base 13: mod_base = OTHER; note = 2'-O-methyluridine-3'-phosphate
  modified_base 14: mod_base = OTHER; note = 2'-O-methyluridine-3'-phosphate
  modified_base 15: mod_base = OTHER; note = 2'-O-methylcytidine-3'-phosphate
  modified_base 16: mod_base = OTHER; note = 2'-O-methyladenosine-3'-phosphate
  modified_base 17: mod_base = OTHER; note = 2'-O-methylcytidine-3'-phosphate
  modified_base 18: mod_base = OTHER; note = 2'-O-methyladenosine-3'-phosphate
  modified_base 19: mod_base = OTHER; note = 2'-O-methylguanosine-3'-phosphorothioate
  modified_base 20: mod_base = OTHER; note = 2'-O-methylcytidine-3'-phosphorothioate
  modified_base 21: mod_base = OTHER; note = 2'-O-methyladenosine
tgacctggttgcttcacagca

SEQ ID NO: 974 - RNA, 21 nt, synthetic construct
  source 1..21: mol_type = other RNA
  modified_base 1: mod_base = OTHER; note = 2'-O-methylguanosine-3'-phosphorothioate
  modified_base 2: mod_base = OTHER; note = 2'-O-methyladenosine-3'-phosphorothioate
  modified_base 3: mod_base = OTHER; note = 2'-O-methylcytidine-3'-phosphate
  modified_base 4: mod_base = OTHER; note = 2'-O-methylcytidine-3'-phosphate
  modified_base 5: mod_base = OTHER; note = 2'-O-methyluridine-3'-phosphate
  modified_base 6: mod_base = OTHER; note = 2'-O-hexadecyl-guanosine-3'-phosphate
  modified_base 7: mod_base = OTHER; note = 2'-deoxy-2'-fluoroguanosine-3'-phosphate
  modified_base 8: mod_base = OTHER; note = 2'-O-methyluridine-3'-phosphate
  modified_base 9: mod_base = OTHER; note = 2'-deoxy-2'-fluorouridine-3'-phosphate
  modified_base 10: mod_base = OTHER; note = 2'-deoxy-2'-fluoroguanosine-3'-phosphate
  modified_base 11: mod_base = OTHER; note = 2'-deoxy-2'-fluorocytidine-3'-phosphate
  modified_base 12: mod_base = OTHER; note = 2'-O-methyluridine-3'-phosphate
  modified_base 13: mod_base = OTHER; note = 2'-O-methyluridine-3'-phosphate
  modified_base 14: mod_base = OTHER; note = 2'-O-methylcytidine-3'-phosphate
  modified_base 15: mod_base = OTHER; note = 2'-O-methyladenosine-3'-phosphate
  modified_base 16: mod_base = OTHER; note = 2'-O-methylcytidine-3'-phosphate
  modified_base 17: mod_base = OTHER; note = 2'-O-methyladenosine-3'-phosphate
  modified_base 18: mod_base = OTHER; note = 2'-O-methylguanosine-3'-phosphate
  modified_base 19: mod_base = OTHER; note = 2'-O-methylcytidine-3'-phosphorothioate
  modified_base 20: mod_base = OTHER; note = 2'-O-methyluridine-3'-phosphorothioate
  modified_base 21: mod_base = OTHER; note = 2'-O-methyladenosine
gacctggttgcttcacagcta

SEQ ID NO: 975 - RNA, 21 nt, synthetic construct
  source 1..21: mol_type = other RNA
  modified_base 1: mod_base = OTHER; note = 2'-O-methyladenosine-3'-phosphorothioate
  modified_base 2: mod_base = OTHER; note = 2'-O-methylcytidine-3'-phosphorothioate
  modified_base 3: mod_base = OTHER; note = 2'-O-methylcytidine-3'-phosphate
  modified_base 4: mod_base = OTHER; note = 2'-O-methyluridine-3'-phosphate
  modified_base 5: mod_base = OTHER; note = 2'-O-methylguanosine-3'-phosphate
  modified_base 6: mod_base = OTHER; note = 2'-O-hexadecyl-guanosine-3'-phosphate
  modified_base 7: mod_base = OTHER; note = 2'-deoxy-2'-fluorouridine-3'-phosphate
  modified_base 8: mod_base = OTHER; note = 2'-O-methyluridine-3'-phosphate
  modified_base 9: mod_base = OTHER; note = 2'-deoxy-2'-fluoroguanosine-3'-phosphate
  modified_base 10: mod_base = OTHER; note = 2'-deoxy-2'-fluorocytidine-3'-phosphate
  modified_base 11: mod_base = OTHER; note = 2'-deoxy-2'-fluorouridine-3'-phosphate
  modified_base 12: mod_base = OTHER; note = 2'-O-methyluridine-3'-phosphate
  modified_base 13: mod_base = OTHER; note = 2'-O-methylcytidine-3'-phosphate
  modified_base 14: mod_base = OTHER; note = 2'-O-methyladenosine-3'-phosphate
  modified_base 15: mod_base = OTHER; note = 2'-O-methylcytidine-3'-phosphate
  modified_base 16: mod_base = OTHER; note = 2'-O-methyladenosine-3'-phosphate
  modified_base 17: mod_base = OTHER; note = 2'-O-methylguanosine-3'-phosphate
  modified_base 18: mod_base = OTHER; note = 2'-O-methylcytidine-3'-phosphate
  modified_base 19: mod_base = OTHER; note = 2'-O-methyluridine-3'-phosphorothioate
  modified_base 20: mod_base = OTHER; note = 2'-O-methylcytidine-3'-phosphorothioate
  modified_base 21: mod_base = OTHER; note = 2'-O-methyladenosine
acctggttgcttcacagctca

SEQ ID NO: 976 - RNA, 21 nt, synthetic construct
  source 1..21: mol_type = other RNA
  modified_base 1: mod_base = OTHER; note = 2'-O-methylcytidine-3'-phosphorothioate
  modified_base 2: mod_base = OTHER; note = 2'-O-methylcytidine-3'-phosphorothioate
  modified_base 3: mod_base = OTHER; note = 2'-O-methyluridine-3'-phosphate
  modified_base 4: mod_base = OTHER; note = 2'-O-methylguanosine-3'-phosphate
  modified_base 5: mod_base = OTHER; note = 2'-O-methylguanosine-3'-phosphate
  modified_base 6: mod_base = OTHER; note = 2'-O-hexadecyl-uridine-3'-phosphate
  modified_base 7: mod_base = OTHER; note = 2'-deoxy-2'-fluorouridine-3'-phosphate
  modified_base 8: mod_base = OTHER; note = 2'-O-methylguanosine-3'-phosphate
  modified_base 9: mod_base = OTHER; note = 2'-deoxy-2'-fluorocytidine-3'-phosphate
  modified_base 10: mod_base = OTHER; note = 2'-deoxy-2'-fluorouridine-3'-phosphate
  modified_base 11: mod_base = OTHER; note = 2'-deoxy-2'-fluorouridine-3'-phosphate
  modified_base 12: mod_base = OTHER; note = 2'-O-methylcytidine-3'-phosphate
  modified_base 13: mod_base = OTHER; note = 2'-O-methyladenosine-3'-phosphate
  modified_base 14: mod_base = OTHER; note = 2'-O-methylcytidine-3'-phosphate
  modified_base 15: mod_base = OTHER; note = 2'-O-methyladenosine-3'-phosphate
  modified_base 16: mod_base = OTHER; note = 2'-O-methylguanosine-3'-phosphate
  modified_base 17: mod_base = OTHER; note = 2'-O-methylcytidine-3'-phosphate
  modified_base 18: mod_base = OTHER; note = 2'-O-methyluridine-3'-phosphate
  modified_base 19: mod_base = OTHER; note = 2'-O-methylcytidine-3'-phosphorothioate
  modified_base 20: mod_base = OTHER; note = 2'-O-methylcytidine-3'-phosphorothioate
  modified_base 21: mod_base = OTHER; note = 2'-O-methyladenosine
cctggttgcttcacagctcca

SEQ ID NO: 977 - RNA, 21 nt, synthetic construct
  source 1..21: mol_type = other RNA
  modified_base 1: mod_base = OTHER; note = 2'-O-methylcytidine-3'-phosphorothioate
  modified_base 2: mod_base = OTHER; note = 2'-O-methyluridine-3'-phosphorothioate
  modified_base 3: mod_base = OTHER; note = 2'-O-methylguanosine-3'-phosphate
  modified_base 4: mod_base = OTHER; note = 2'-O-methylguanosine-3'-phosphate
  modified_base 5: mod_base = OTHER; note = 2'-O-methyluridine-3'-phosphate
  modified_base 6: mod_base = OTHER; note = 2'-O-hexadecyl-uridine-3'-phosphate
  modified_base 7: mod_base = OTHER; note = 2'-deoxy-2'-fluoroguanosine-3'-phosphate
  modified_base 8: mod_base = OTHER; note = 2'-O-methylcytidine-3'-phosphate
  modified_base 9: mod_base = OTHER; note = 2'-deoxy-2'-fluorouridine-3'-phosphate
  modified_base 10: mod_base = OTHER; note = 2'-deoxy-2'-fluorouridine-3'-phosphate
  modified_base 11: mod_base = OTHER; note = 2'-deoxy-2'-fluorocytidine-3'-phosphate
  modified_base 12: mod_base = OTHER; note = 2'-O-methyladenosine-3'-phosphate
  modified_base 13: mod_base = OTHER; note = 2'-O-methylcytidine-3'-phosphate
  modified_base 14: mod_base = OTHER; note = 2'-O-methyladenosine-3'-phosphate
  modified_base 15: mod_base = OTHER; note = 2'-O-methylguanosine-3'-phosphate
  modified_base 16: mod_base = OTHER; note = 2'-O-methylcytidine-3'-phosphate
  modified_base 17: mod_base = OTHER; note = 2'-O-methyluridine-3'-phosphate
  modified_base 18: mod_base = OTHER; note = 2'-O-methylcytidine-3'-phosphate
  modified_base 19: mod_base = OTHER; note = 2'-O-methylcytidine-3'-phosphorothioate
  modified_base 20: mod_base = OTHER; note = 2'-O-methylguanosine-3'-phosphorothioate
  modified_base 21: mod_base = OTHER; note = 2'-O-methyladenosine
ctggttgcttcacagctccga

SEQ ID NO: 978 - RNA, 21 nt, synthetic construct
  source 1..21: mol_type = other RNA
  modified_base 1: mod_base = OTHER; note = 2'-O-methyluridine-3'-phosphorothioate
  modified_base 2: mod_base = OTHER; note = 2'-O-methylguanosine-3'-phosphorothioate
  modified_base 3: mod_base = OTHER; note = 2'-O-methylguanosine-3'-phosphate
  modified_base 4: mod_base = OTHER; note = 2'-O-methyluridine-3'-phosphate
  modified_base 5: mod_base = OTHER; note = 2'-O-methyluridine-3'-phosphate
  modified_base 6: mod_base = OTHER; note = 2'-O-hexadecyl-guanosine-3'-phosphate
  modified_base 7: mod_base = OTHER; note = 2'-deoxy-2'-fluorocytidine-3'-phosphate
  modified_base 8: mod_base = OTHER; note = 2'-O-methyluridine-3'-phosphate
  modified_base 9: mod_base = OTHER; note = 2'-deoxy-2'-fluorouridine-3'-phosphate
  modified_base 10: mod_base = OTHER; note = 2'-deoxy-2'-fluorocytidine-3'-phosphate
  modified_base 11: mod_base = OTHER; note = 2'-deoxy-2'-fluoroadenosine-3'-phosphate
  modified_base 12: mod_base = OTHER; note = 2'-O-methylcytidine-3'-phosphate
  modified_base 13: mod_base = OTHER; note = 2'-O-methyladenosine-3'-phosphate
  modified_base 14: mod_base = OTHER; note = 2'-O-methylguanosine-3'-phosphate
  modified_base 15: mod_base = OTHER; note = 2'-O-methylcytidine-3'-phosphate
  modified_base 16: mod_base = OTHER; note = 2'-O-methyluridine-3'-phosphate
  modified_base 17: mod_base = OTHER; note = 2'-O-methylcytidine-3'-phosphate
  modified_base 18: mod_base = OTHER; note = 2'-O-methylcytidine-3'-phosphate
  modified_base 19: mod_base = OTHER; note = 2'-O-methylguanosine-3'-phosphorothioate
  modified_base 20: mod_base = OTHER; note = 2'-O-methyladenosine-3'-phosphorothioate
  modified_base 21: mod_base = OTHER; note = 2'-O-methyladenosine
tggttgcttcacagctccgaa

SEQ ID NO: 979 - RNA, 21 nt, synthetic construct
  source 1..21: mol_type = other RNA
  modified_base 1: mod_base = OTHER; note = 2'-O-methylguanosine-3'-phosphorothioate
  modified_base 2: mod_base = OTHER; note = 2'-O-methylguanosine-3'-phosphorothioate
  modified_base 3: mod_base = OTHER; note = 2'-O-methyluridine-3'-phosphate
  modified_base 4: mod_base = OTHER; note = 2'-O-methyluridine-3'-phosphate
  modified_base 5: mod_base = OTHER; note = 2'-O-methylguanosine-3'-phosphate
  modified_base 6: mod_base = OTHER; note = 2'-O-hexadecyl-cytidine-3'-phosphate
  modified_base 7: mod_base = OTHER; note = 2'-deoxy-2'-fluorouridine-3'-phosphate
  modified_base 8: mod_base = OTHER; note = 2'-O-methyluridine-3'-phosphate
  modified_base 9: mod_base = OTHER; note = 2'-deoxy-2'-fluorocytidine-3'-phosphate
  modified_base 10: mod_base = OTHER; note = 2'-deoxy-2'-fluoroadenosine-3'-phosphate
  modified_base 11: mod_base = OTHER; note = 2'-deoxy-2'-fluorocytidine-3'-phosphate
  modified_base 12: mod_base = OTHER; note = 2'-O-methyladenosine-3'-phosphate
  modified_base 13: mod_base = OTHER; note = 2'-O-methylguanosine-3'-phosphate
  modified_base 14: mod_base = OTHER; note = 2'-O-methylcytidine-3'-phosphate
  modified_base 15: mod_base = OTHER; note = 2'-O-methyluridine-3'-phosphate
  modified_base 16: mod_base = OTHER; note = 2'-O-methylcytidine-3'-phosphate
  modified_base 17: mod_base = OTHER; note = 2'-O-methylcytidine-3'-phosphate
  modified_base 18: mod_base = OTHER; note = 2'-O-methylguanosine-3'-phosphate
  modified_base 19: mod_base = OTHER; note = 2'-O-methyladenosine-3'-phosphorothioate
  modified_base 20: mod_base = OTHER; note = 2'-O-methylguanosine-3'-phosphorothioate
  modified_base 21: mod_base = OTHER; note = 2'-O-methyladenosine
ggttgcttcacagctccgaga

SEQ ID NO: 980 - RNA, 21 nt, synthetic construct
  source 1..21: mol_type = other RNA
  modified_base 1: mod_base = OTHER; note = 2'-O-methylguanosine-3'-phosphorothioate
  modified_base 2: mod_base = OTHER; note = 2'-O-methyluridine-3'-phosphorothioate
  modified_base 3: mod_base = OTHER; note = 2'-O-methyluridine-3'-phosphate
  modified_base 4: mod_base = OTHER; note = 2'-O-methylguanosine-3'-phosphate
  modified_base 5: mod_base = OTHER; note = 2'-O-methylcytidine-3'-phosphate
  modified_base 6: mod_base = OTHER; note = 2'-O-hexadecyl-uridine-3'-phosphate
  modified_base 7: mod_base = OTHER; note = 2'-deoxy-2'-fluorouridine-3'-phosphate
  modified_base 8: mod_base = OTHER; note = 2'-O-methylcytidine-3'-phosphate
  modified_base 9: mod_base = OTHER; note = 2'-deoxy-2'-fluoroadenosine-3'-phosphate
  modified_base 10: mod_base = OTHER; note = 2'-deoxy-2'-fluorocytidine-3'-phosphate
  modified_base 11: mod_base = OTHER; note = 2'-deoxy-2'-fluoroadenosine-3'-phosphate
  modified_base 12: mod_base = OTHER; note = 2'-O-methylguanosine-3'-phosphate
  modified_base 13: mod_base = OTHER; note = 2'-O-methylcytidine-3'-phosphate
  modified_base 14: mod_base = OTHER; note = 2'-O-methyluridine-3'-phosphate
  modified_base 15: mod_base = OTHER; note = 2'-O-methylcytidine-3'-phosphate
  modified_base 16: mod_base = OTHER; note = 2'-O-methylcytidine-3'-phosphate
  modified_base 17: mod_base = OTHER; note = 2'-O-methylguanosine-3'-phosphate
  modified_base 18: mod_base = OTHER; note = 2'-O-methyladenosine-3'-phosphate
  modified_base 19: mod_base = OTHER; note = 2'-O-methylguanosine-3'-phosphorothioate
  modified_base 20: mod_base = OTHER; note = 2'-O-methyladenosine-3'-phosphorothioate
  modified_base 21: mod_base = OTHER; note = 2'-O-methyladenosine
gttgcttcacagctccgagaa

SEQ ID NO: 981 - RNA, 21 nt, synthetic construct
  source 1..21: mol_type = other RNA
  modified_base 1: mod_base = OTHER; note = 2'-O-methyluridine-3'-phosphorothioate
  modified_base 2: mod_base = OTHER; note = 2'-O-methyluridine-3'-phosphorothioate
  modified_base 3: mod_base = OTHER; note = 2'-O-methylguanosine-3'-phosphate
  modified_base 4: mod_base = OTHER; note = 2'-O-methylcytidine-3'-phosphate
  modified_base 5: mod_base = OTHER; note = 2'-O-methyluridine-3'-phosphate
  modified_base 6: mod_base = OTHER; note = 2'-O-hexadecyl-uridine-3'-phosphate
  modified_base 7: mod_base = OTHER; note = 2'-deoxy-2'-fluorocytidine-3'-phosphate
  modified_base 8: mod_base = OTHER; note = 2'-O-methyladenosine-3'-phosphate
  modified_base 9: mod_base = OTHER; note = 2'-deoxy-2'-fluorocytidine-3'-phosphate
  modified_base 10: mod_base = OTHER; note = 2'-deoxy-2'-fluoroadenosine-3'-phosphate
  modified_base 11: mod_base = OTHER; note = 2'-deoxy-2'-fluoroguanosine-3'-phosphate
  modified_base 12: mod_base = OTHER; note = 2'-O-methylcytidine-3'-phosphate
  modified_base 13: mod_base = OTHER; note = 2'-O-methyluridine-3'-phosphate
  modified_base 14: mod_base = OTHER; note = 2'-O-methylcytidine-3'-phosphate
  modified_base 15: mod_base = OTHER; note = 2'-O-methylcytidine-3'-phosphate
  modified_base 16: mod_base = OTHER; note = 2'-O-methylguanosine-3'-phosphate
  modified_base 17: mod_base = OTHER; note = 2'-O-methyladenosine-3'-phosphate
  modified_base 18: mod_base = OTHER; note = 2'-O-methylguanosine-3'-phosphate
  modified_base 19: mod_base = OTHER; note = 2'-O-methyladenosine-3'-phosphorothioate
  modified_base 20: mod_base = OTHER; note = 2'-O-methyluridine-3'-phosphorothioate
  modified_base 21: mod_base = OTHER; note = 2'-O-methyladenosine
ttgcttcacagctccgagata

SEQ ID NO: 982 - RNA, 21 nt, synthetic construct
  source 1..21: mol_type = other RNA
  modified_base 1: mod_base = OTHER; note = 2'-O-methylcytidine-3'-phosphorothioate
  modified_base 2: mod_base = OTHER; note = 2'-O-methyladenosine-3'-phosphorothioate
  modified_base 3: mod_base = OTHER; note = 2'-O-methylguanosine-3'-phosphate
  modified_base 4: mod_base = OTHER; note = 2'-O-methylcytidine-3'-phosphate
  modified_base 5: mod_base = OTHER; note = 2'-O-methyluridine-3'-phosphate
  modified_base 6: mod_base = OTHER; note = 2'-O-hexadecyl-cytidine-3'-phosphate
  modified_base 7: mod_base = OTHER; note = 2'-deoxy-2'-fluorocytidine-3'-phosphate
  modified_base 8: mod_base = OTHER; note = 2'-O-methylguanosine-3'-phosphate
  modified_base 9: mod_base = OTHER; note = 2'-deoxy-2'-fluoroadenosine-3'-phosphate
  modified_base 10: mod_base = OTHER; note = 2'-deoxy-2'-fluoroguanosine-3'-phosphate
  modified_base 11: mod_base = OTHER; note = 2'-deoxy-2'-fluoroadenosine-3'-phosphate
  modified_base 12: mod_base = OTHER; note = 2'-O-methyluridine-3'-phosphate
  modified_base 13: mod_base = OTHER; note = 2'-O-methylguanosine-3'-phosphate
  modified_base 14: mod_base = OTHER; note = 2'-O-methyladenosine-3'-phosphate
  modified_base 15: mod_base = OTHER; note = 2'-O-methylcytidine-3'-phosphate
  modified_base 16: mod_base = OTHER; note = 2'-O-methyladenosine-3'-phosphate
  modified_base 17: mod_base = OTHER; note = 2'-O-methylcytidine-3'-phosphate
  modified_base 18: mod_base = OTHER; note = 2'-O-methyladenosine-3'-phosphate
  modified_base 19: mod_base = OTHER; note = 2'-O-methylguanosine-3'-phosphorothioate
  modified_base 20: mod_base = OTHER; note = 2'-O-methyladenosine-3'-phosphorothioate
  modified_base 21: mod_base = OTHER; note = 2'-O-methyladenosine
cagctccgagatgacacagaa

SEQ ID NO: 983 - RNA, 21 nt, synthetic construct
  source 1..21: mol_type = other RNA
  modified_base 1: mod_base = OTHER; note = 2'-O-methylguanosine-3'-phosphorothioate
  modified_base 2: mod_base = OTHER; note = 2'-O-methylcytidine-3'-phosphorothioate
  modified_base 3: mod_base = OTHER; note = 2'-O-methyluridine-3'-phosphate
  modified_base 4: mod_base = OTHER; note = 2'-O-methylcytidine-3'-phosphate
  modified_base 5: mod_base = OTHER; note = 2'-O-methylcytidine-3'-phosphate
  modified_base 6: mod_base = OTHER; note = 2'-O-hexadecyl-guanosine-3'-phosphate
  modified_base 7: mod_base = OTHER; note = 2'-deoxy-2'-fluoroadenosine-3'-phosphate
  modified_base 8: mod_base = OTHER; note = 2'-O-methylguanosine-3'-phosphate
  modified_base 9: mod_base = OTHER; note = 2'-deoxy-2'-fluoroadenosine-3'-phosphate
  modified_base 10: mod_base = OTHER; note = 2'-deoxy-2'-fluorouridine-3'-phosphate
  modified_base 11: mod_base = OTHER; note = 2'-deoxy-2'-fluoroguanosine-3'-phosphate
  modified_base 12: mod_base = OTHER; note = 2'-O-methyladenosine-3'-phosphate
  modified_base 13: mod_base = OTHER; note = 2'-O-methylcytidine-3'-phosphate
  modified_base 14: mod_base = OTHER; note = 2'-O-methyladenosine-3'-phosphate
  modified_base 15: mod_base = OTHER; note = 2'-O-methylcytidine-3'-phosphate
  modified_base 16: mod_base = OTHER; note = 2'-O-methyladenosine-3'-phosphate
  modified_base 17: mod_base = OTHER; note = 2'-O-methylguanosine-3'-phosphate
  modified_base 18: mod_base = OTHER; note = 2'-O-methyladenosine-3'-phosphate
  modified_base 19: mod_base = OTHER; note = 2'-O-methylcytidine-3'-phosphorothioate
  modified_base 20: mod_base = OTHER; note = 2'-O-methyluridine-3'-phosphorothioate
  modified_base 21: mod_base = OTHER; note = 2'-O-methyladenosine
gctccgagatgacacagacta

SEQ ID NO: 984 - RNA, 21 nt, synthetic construct
  source 1..21: mol_type = other RNA
  modified_base 1: mod_base = OTHER; note = 2'-O-methylcytidine-3'-phosphorothioate
  modified_base 2: mod_base = OTHER; note = 2'-O-methyluridine-3'-phosphorothioate
  modified_base 3: mod_base = OTHER; note = 2'-O-methylcytidine-3'-phosphate
  modified_base 4: mod_base = OTHER; note = 2'-O-methylcytidine-3'-phosphate
  modified_base 5: mod_base = OTHER; note = 2'-O-methylguanosine-3'-phosphate
  modified_base 6: mod_base = OTHER; note = 2'-O-hexadecyl-adenosine-3'-phosphate
  modified_base 7: mod_base = OTHER; note = 2'-deoxy-2'-fluoroguanosine-3'-phosphate
  modified_base 8: mod_base = OTHER; note = 2'-O-methyladenosine-3'-phosphate
  modified_base 9: mod_base = OTHER; note = 2'-deoxy-2'-fluorouridine-3'-phosphate
  modified_base 10: mod_base = OTHER; note = 2'-deoxy-2'-fluoroguanosine-3'-phosphate
  modified_base 11: mod_base = OTHER; note = 2'-deoxy-2'-fluoroadenosine-3'-phosphate
  modified_base 12: mod_base = OTHER; note = 2'-O-methylcytidine-3'-phosphate
  modified_base 13: mod_base = OTHER; note = 2'-O-methyladenosine-3'-phosphate
  modified_base 14: mod_base = OTHER; note = 2'-O-methylcytidine-3'-phosphate
  modified_base 15: mod_base = OTHER; note = 2'-O-methyladenosine-3'-phosphate
  modified_base 16: mod_base = OTHER; note = 2'-O-methylguanosine-3'-phosphate
  modified_base 17: mod_base = OTHER; note = 2'-O-methyladenosine-3'-phosphate
  modified_base 18: mod_base = OTHER; note = 2'-O-methylcytidine-3'-phosphate
  modified_base 19: mod_base = OTHER; note = 2'-O-methyluridine-3'-phosphorothioate
  modified_base 20: mod_base = OTHER; note = 2'-O-methyluridine-3'-phosphorothioate
  modified_base 21: mod_base = OTHER; note = 2'-O-methyladenosine
ctccgagatgacacagactta

SEQ ID NO: 985 - RNA, 21 nt, synthetic construct
  source 1..21: mol_type = other RNA
  modified_base 1: mod_base = OTHER; note = 2'-O-methyluridine-3'-phosphorothioate
  modified_base 2: mod_base = OTHER; note = 2'-O-methylcytidine-3'-phosphorothioate
  modified_base 3: mod_base = OTHER; note = 2'-O-methylcytidine-3'-phosphate
  modified_base 4: mod_base = OTHER; note = 2'-O-methylguanosine-3'-phosphate
  modified_base 5: mod_base = OTHER; note = 2'-O-methyladenosine-3'-phosphate
  modified_base 6: mod_base = OTHER; note = 2'-O-hexadecyl-guanosine-3'-phosphate
  modified_base 7: mod_base = OTHER; note = 2'-deoxy-2'-fluoroadenosine-3'-phosphate
  modified_base 8: mod_base = OTHER; note = 2'-O-methyluridine-3'-phosphate
  modified_base 9: mod_base = OTHER; note = 2'-deoxy-2'-fluoroguanosine-3'-phosphate
  modified_base 10: mod_base = OTHER; note = 2'-deoxy-2'-fluoroadenosine-3'-phosphate
  modified_base 11: mod_base = OTHER; note = 2'-deoxy-2'-fluorocytidine-3'-phosphate
  modified_base 12: mod_base = OTHER; note = 2'-O-methyladenosine-3'-phosphate
  modified_base 13: mod_base = OTHER; note = 2'-O-methylcytidine-3'-phosphate
  modified_base 14: mod_base = OTHER; note = 2'-O-methyladenosine-3'-phosphate
  modified_base 15: mod_base = OTHER; note = 2'-O-methylguanosine-3'-phosphate
  modified_base 16: mod_base = OTHER; note = 2'-O-methyladenosine-3'-phosphate
  modified_base 17: mod_base = OTHER; note = 2'-O-methylcytidine-3'-phosphate
  modified_base 18: mod_base = OTHER; note = 2'-O-methyluridine-3'-phosphate
  modified_base 19: mod_base = OTHER; note = 2'-O-methyluridine-3'-phosphorothioate
  modified_base 20: mod_base = OTHER; note = 2'-O-methylguanosine-3'-phosphorothioate
  modified_base 21: mod_base = OTHER; note = 2'-O-methyladenosine
tccgagatgacacagacttga

SEQ ID NO: 986 - RNA, 21 nt, synthetic construct
  source 1..21: mol_type = other RNA
  modified_base 1: mod_base = OTHER; note = 2'-O-methylcytidine-3'-phosphorothioate
  modified_base 2: mod_base = OTHER; note = 2'-O-methylcytidine-3'-phosphorothioate
  modified_base 3: mod_base = OTHER; note = 2'-O-methylguanosine-3'-phosphate
  modified_base 4: mod_base = OTHER; note = 2'-O-methyladenosine-3'-phosphate
  modified_base 5: mod_base = OTHER; note = 2'-O-methylguanosine-3'-phosphate
  modified_base 6: mod_base = OTHER; note = 2'-O-hexadecyl-adenosine-3'-phosphate
  modified_base 7: mod_base = OTHER; note = 2'-deoxy-2'-fluorouridine-3'-phosphate
  modified_base 8: mod_base = OTHER; note = 2'-O-methylguanosine-3'-phosphate
  modified_base 9: mod_base = OTHER; note = 2'-deoxy-2'-fluoroadenosine-3'-phosphate
  modified_base 10: mod_base = OTHER; note = 2'-deoxy-2'-fluorocytidine-3'-phosphate
  modified_base 11: mod_base = OTHER; note = 2'-deoxy-2'-fluoroadenosine-3'-phosphate
  modified_base 12: mod_base = OTHER; note = 2'-O-methylcytidine-3'-phosphate
  modified_base 13: mod_base = OTHER; note = 2'-O-methyladenosine-3'-phosphate
  modified_base 14: mod_base = OTHER; note = 2'-O-methylguanosine-3'-phosphate
  modified_base 15: mod_base = OTHER; note = 2'-O-methyladenosine-3'-phosphate
  modified_base 16: mod_base = OTHER; note = 2'-O-methylcytidine-3'-phosphate
  modified_base 17: mod_base = OTHER; note = 2'-O-methyluridine-3'-phosphate
  modified_base 18: mod_base = OTHER; note = 2'-O-methyluridine-3'-phosphate
  modified_base 19: mod_base = OTHER; note = 2'-O-methylguanosine-3'-phosphorothioate
  modified_base 20: mod_base = OTHER; note = 2'-O-methylcytidine-3'-phosphorothioate
  modified_base 21: mod_base = OTHER; note = 2'-O-methyladenosine
ccgagatgacacagacttgca

SEQ ID NO: 987 - RNA, 21 nt, synthetic construct
  source 1..21: mol_type = other RNA
  modified_base 1: mod_base = OTHER; note = 2'-O-methylcytidine-3'-phosphorothioate
  modified_base 2: mod_base = OTHER; note = 2'-O-methylguanosine-3'-phosphorothioate
  modified_base 3: mod_base = OTHER; note = 2'-O-methyladenosine-3'-phosphate
  modified_base 4: mod_base = OTHER; note = 2'-O-methylguanosine-3'-phosphate
  modified_base 5: mod_base = OTHER; note = 2'-O-methyladenosine-3'-phosphate
  modified_base 6: mod_base = OTHER; note = 2'-O-hexadecyl-uridine-3'-phosphate
  modified_base 7: mod_base = OTHER; note = 2'-deoxy-2'-fluoroguanosine-3'-phosphate
  modified_base 8: mod_base = OTHER; note = 2'-O-methyladenosine-3'-phosphate
  modified_base 9: mod_base = OTHER; note = 2'-deoxy-2'-fluorocytidine-3'-phosphate
  modified_base 10: mod_base = OTHER; note = 2'-deoxy-2'-fluoroadenosine-3'-phosphate
  modified_base 11: mod_base = OTHER; note = 2'-deoxy-2'-fluorocytidine-3'-phosphate
  modified_base 12: mod_base = OTHER; note = 2'-O-methyladenosine-3'-phosphate
  modified_base 13: mod_base = OTHER; note = 2'-O-methylguanosine-3'-phosphate
  modified_base 14: mod_base = OTHER; note = 2'-O-methyladenosine-3'-phosphate
  modified_base 15: mod_base = OTHER; note = 2'-O-methylcytidine-3'-phosphate
  modified_base 16: mod_base = OTHER; note = 2'-O-methyluridine-3'-phosphate
  modified_base 17: mod_base = OTHER; note = 2'-O-methyluridine-3'-phosphate
  modified_base 18: mod_base = OTHER; note = 2'-O-methylguanosine-3'-phosphate
  modified_base 19: mod_base = OTHER; note = 2'-O-methylcytidine-3'-phosphorothioate
  modified_base 20: mod_base = OTHER; note = 2'-O-methyluridine-3'-phosphorothioate
  modified_base 21: mod_base = OTHER; note = 2'-O-methyladenosine
cgagatgacacagacttgcta

SEQ ID NO: 988 - RNA, 21 nt, synthetic construct
  source 1..21: mol_type = other RNA
  modified_base 1: mod_base = OTHER; note = 2'-O-methylguanosine-3'-phosphorothioate
  modified_base 2: mod_base = OTHER; note = 2'-O-methyladenosine-3'-phosphorothioate
  modified_base 3: mod_base = OTHER; note = 2'-O-methylguanosine-3'-phosphate
  modified_base 4: mod_base = OTHER; note = 2'-O-methyladenosine-3'-phosphate
  modified_base 5: mod_base = OTHER; note = 2'-O-methyluridine-3'-phosphate
  modified_base 6: mod_base = OTHER; note = 2'-O-hexadecyl-guanosine-3'-phosphate
  modified_base 7: mod_base = OTHER; note = 2'-deoxy-2'-fluoroadenosine-3'-phosphate
  modified_base 8: mod_base = OTHER; note = 2'-O-methylcytidine-3'-phosphate
  modified_base 9: mod_base = OTHER; note = 2'-deoxy-2'-fluoroadenosine-3'-phosphate
  modified_base 10: mod_base = OTHER; note = 2'-deoxy-2'-fluorocytidine-3'-phosphate
  modified_base 11: mod_base = OTHER; note = 2'-deoxy-2'-fluoroadenosine-3'-phosphate
  modified_base 12: mod_base = OTHER; note = 2'-O-methylguanosine-3'-phosphate
  modified_base 13: mod_base = OTHER; note = 2'-O-methyladenosine-3'-phosphate
  modified_base 14: mod_base = OTHER; note = 2'-O-methylcytidine-3'-phosphate
  modified_base 15: mod_base = OTHER; note = 2'-O-methyluridine-3'-phosphate
  modified_base 16: mod_base = OTHER; note = 2'-O-methyluridine-3'-phosphate
  modified_base 17: mod_base = OTHER; note = 2'-O-methylguanosine-3'-phosphate
  modified_base 18: mod_base = OTHER; note = 2'-O-methylcytidine-3'-phosphate
  modified_base 19: mod_base = OTHER; note = 2'-O-methyluridine-3'-phosphorothioate
  modified_base 20: mod_base = OTHER; note = 2'-O-methyluridine-3'-phosphorothioate
  modified_base 21: mod_base = OTHER; note = 2'-O-methyladenosine
gagatgacacagacttgctta

SEQ ID NO: 989 - RNA, 21 nt, synthetic construct
  source 1..21: mol_type = other RNA
  modified_base 1: mod_base = OTHER; note = 2'-O-methylguanosine-3'-phosphorothioate
  modified_base 2: mod_base = OTHER; note = 2'-O-methyladenosine-3'-phosphorothioate
  modified_base 3: mod_base = OTHER; note = 2'-O-methyluridine-3'-phosphate
  modified_base 4: mod_base = OTHER; note = 2'-O-methylguanosine-3'-phosphate
  modified_base 5: mod_base = OTHER; note = 2'-O-methyladenosine-3'-phosphate
  modified_base 6: mod_base = OTHER; note = 2'-O-hexadecyl-cytidine-3'-phosphate
  modified_base 7: mod_base = OTHER; note = 2'-deoxy-2'-fluoroadenosine-3'-phosphate
  modified_base 8: mod_base = OTHER; note = 2'-O-methylcytidine-3'-phosphate
  modified_base 9: mod_base = OTHER; note = 2'-deoxy-2'-fluoroadenosine-3'-phosphate
  modified_base 10: mod_base = OTHER; note = 2'-deoxy-2'-fluoroguanosine-3'-phosphate
  modified_base 11: mod_base = OTHER; note = 2'-deoxy-2'-fluoroadenosine-3'-phosphate
  modified_base 12: mod_base = OTHER; note = 2'-O-methylcytidine-3'-phosphate
  modified_base 13: mod_base = OTHER; note = 2'-O-methyluridine-3'-phosphate
  modified_base 14: mod_base = OTHER; note = 2'-O-methyluridine-3'-phosphate
  modified_base 15: mod_base = OTHER; note = 2'-O-methylguanosine-3'-phosphate
  modified_base 16: mod_base = OTHER; note = 2'-O-methylcytidine-3'-phosphate
  modified_base 17: mod_base = OTHER; note = 2'-O-methyluridine-3'-phosphate
  modified_base 18: mod_base = OTHER; note = 2'-O-methyluridine-3'-phosphate
  modified_base 19: mod_base = OTHER; note = 2'-O-methyladenosine-3'-phosphorothioate
  modified_base 20: mod_base = OTHER; note = 2'-O-methyladenosine-3'-phosphorothioate
  modified_base 21: mod_base = OTHER; note = 2'-O-methyladenosine
gatgacacagacttgcttaaa

SEQ ID NO: 990 - RNA, 21 nt, synthetic construct
  source 1..21: mol_type = other RNA
  modified_base 1: mod_base = OTHER; note = 2'-O-methyladenosine-3'-phosphorothioate
  modified_base 2: mod_base = OTHER; note = 2'-O-methyluridine-3'-phosphorothioate
  modified_base 3: mod_base = OTHER; note = 2'-O-methylguanosine-3'-phosphate
  modified_base 4: mod_base = OTHER; note = 2'-O-methyladenosine-3'-phosphate
  modified_base 5: mod_base = OTHER; note = 2'-O-methylcytidine-3'-phosphate
  modified_base 6: mod_base = OTHER; note = 2'-O-hexadecyl-adenosine-3'-phosphate
  modified_base 7: mod_base = OTHER; note = 2'-deoxy-2'-fluorocytidine-3'-phosphate
  modified_base 8: mod_base = OTHER; note = 2'-O-methyladenosine-3'-phosphate
  modified_base 9: mod_base = OTHER; note = 2'-deoxy-2'-fluoroguanosine-3'-phosphate
  modified_base 10: mod_base = OTHER; note = 2'-deoxy-2'-fluoroadenosine-3'-phosphate
  modified_base 11: mod_base = OTHER; note = 2'-deoxy-2'-fluorocytidine-3'-phosphate
  modified_base 12: mod_base = OTHER; note = 2'-O-methyluridine-3'-phosphate
  modified_base 13: mod_base = OTHER; note = 2'-O-methyluridine-3'-phosphate
  modified_base 14: mod_base = OTHER; note = 2'-O-methylguanosine-3'-phosphate
  modified_base 15: mod_base = OTHER; note = 2'-O-methylcytidine-3'-phosphate
  modified_base 16: mod_base = OTHER; note = 2'-O-methyluridine-3'-phosphate
  modified_base 17: mod_base = OTHER; note = 2'-O-methyluridine-3'-phosphate
  modified_base 18: mod_base = OTHER; note = 2'-O-methyladenosine-3'-phosphate
  modified_base 19: mod_base = OTHER; note = 2'-O-methyladenosine-3'-phosphorothioate
  modified_base 20: mod_base = OTHER; note = 2'-O-methyladenosine-3'-phosphorothioate
  modified_base 21: mod_base = OTHER; note = 2'-O-methyladenosine
atgacacagacttgcttaaaa

SEQ ID NO: 991 - RNA, 21 nt, synthetic construct
  source 1..21: mol_type = other RNA
  modified_base 1: mod_base = OTHER; note = 2'-O-methyluridine-3'-phosphorothioate
  modified_base 2: mod_base = OTHER; note = 2'-O-methylguanosine-3'-phosphorothioate
  modified_base 3: mod_base = OTHER; note = 2'-O-methyladenosine-3'-phosphate
  modified_base 4: mod_base = OTHER; note = 2'-O-methylcytidine-3'-phosphate
  modified_base 5: mod_base = OTHER; note = 2'-O-methyladenosine-3'-phosphate
  modified_base 6: mod_base = OTHER; note = 2'-O-hexadecyl-cytidine-3'-phosphate
  modified_base 7: mod_base = OTHER; note = 2'-deoxy-2'-fluoroadenosine-3'-phosphate
  modified_base 8: mod_base = OTHER; note = 2'-O-methylguanosine-3'-phosphate
  modified_base 9: mod_base = OTHER; note = 2'-deoxy-2'-fluoroadenosine-3'-phosphate
  modified_base 10: mod_base = OTHER; note = 2'-deoxy-2'-fluorocytidine-3'-phosphate
  modified_base 11: mod_base = OTHER; note = 2'-deoxy-2'-fluorouridine-3'-phosphate
  modified_base 12: mod_base = OTHER; note = 2'-O-methyluridine-3'-phosphate
  modified_base 13: mod_base = OTHER; note = 2'-O-methylguanosine-3'-phosphate
  modified_base 14: mod_base = OTHER; note = 2'-O-methylcytidine-3'-phosphate
  modified_base 15: mod_base = OTHER; note = 2'-O-methyluridine-3'-phosphate
  modified_base 16: mod_base = OTHER; note = 2'-O-methyluridine-3'-phosphate
  modified_base 17: mod_base = OTHER; note = 2'-O-methyladenosine-3'-phosphate
  modified_base 18: mod_base = OTHER; note = 2'-O-methyladenosine-3'-phosphate
  modified_base 19: mod_base = OTHER; note = 2'-O-methyladenosine-3'-phosphorothioate
  modified_base 20: mod_base = OTHER; note = 2'-O-methylguanosine-3'-phosphorothioate
  modified_base 21: mod_base = OTHER; note = 2'-O-methyladenosine
tgacacagacttgcttaaaga

SEQ ID NO: 992 - RNA, 21 nt, synthetic construct
  source 1..21: mol_type = other RNA
  modified_base 1: mod_base = OTHER; note = 2'-O-methylguanosine-3'-phosphorothioate
  modified_base 2: mod_base = OTHER; note = 2'-O-methyladenosine-3'-phosphorothioate
  modified_base 3: mod_base = OTHER; note = 2'-O-methylcytidine-3'-phosphate
  modified_base 4: mod_base = OTHER; note = 2'-O-methyladenosine-3'-phosphate
  modified_base 5: mod_base = OTHER; note = 2'-O-methylcytidine-3'-phosphate
  modified_base 6: mod_base = OTHER; note = 2'-O-hexadecyl-adenosine-3'-phosphate
  modified_base 7: mod_base = OTHER; note = 2'-deoxy-2'-fluoroguanosine-3'-phosphate
  modified_base 8: mod_base = OTHER; note = 2'-O-methyladenosine-3'-phosphate
  modified_base 9: mod_base = OTHER; note = 2'-deoxy-2'-fluorocytidine-3'-phosphate
  modified_base 10: mod_base = OTHER; note = 2'-deoxy-2'-fluorouridine-3'-phosphate
  modified_base 11: mod_base = OTHER; note = 2'-deoxy-2'-fluorouridine-3'-phosphate
  modified_base 12: mod_base = OTHER; note = 2'-O-methylguanosine-3'-phosphate
  modified_base 13: mod_base = OTHER; note = 2'-O-methylcytidine-3'-phosphate
  modified_base 14: mod_base = OTHER; note = 2'-O-methyluridine-3'-phosphate
  modified_base 15: mod_base = OTHER; note = 2'-O-methyluridine-3'-phosphate
  modified_base 16: mod_base = OTHER; note = 2'-O-methyladenosine-3'-phosphate
  modified_base 17: mod_base = OTHER; note = 2'-O-methyladenosine-3'-phosphate
  modified_base 18: mod_base = OTHER; note = 2'-O-methyladenosine-3'-phosphate
  modified_base 19: mod_base = OTHER; note = 2'-O-methylguanosine-3'-phosphorothioate
  modified_base 20: mod_base = OTHER; note = 2'-O-methylguanosine-3'-phosphorothioate
  modified_base 21: mod_base = OTHER; note = 2'-O-methyladenosine
gacacagacttgcttaaagga

SEQ ID NO: 993 - RNA, 21 nt, synthetic construct
  source 1..21: mol_type = other RNA
  modified_base 1: mod_base = OTHER; note = 2'-O-methyladenosine-3'-phosphorothioate
  modified_base 2: mod_base = OTHER; note = 2'-O-methylcytidine-3'-phosphorothioate
  modified_base 3: mod_base = OTHER; note = 2'-O-methyladenosine-3'-phosphate
  modified_base 4: mod_base = OTHER; note = 2'-O-methylcytidine-3'-phosphate
  modified_base 5: mod_base = OTHER; note = 2'-O-methyladenosine-3'-phosphate
  modified_base 6: mod_base = OTHER; note = 2'-O-hexadecyl-guanosine-3'-phosphate
  modified_base 7: mod_base = OTHER; note = 2'-deoxy-2'-fluoroadenosine-3'-phosphate
  modified_base 8: mod_base = OTHER; note = 2'-O-methylcytidine-3'-phosphate
  modified_base 9: mod_base = OTHER; note = 2'-deoxy-2'-fluorouridine-3'-phosphate
  modified_base 10: mod_base = OTHER; note = 2'-deoxy-2'-fluorouridine-3'-phosphate
  modified_base 11: mod_base = OTHER; note = 2'-deoxy-2'-fluoroguanosine-3'-phosphate
  modified_base 12: mod_base = OTHER; note = 2'-O-methylcytidine-3'-phosphate
  modified_base 13: mod_base = OTHER; note = 2'-O-methyluridine-3'-phosphate
  modified_base 14: mod_base = OTHER; note = 2'-O-methyluridine-3'-phosphate
  modified_base 15: mod_base = OTHER; note = 2'-O-methyladenosine-3'-phosphate
  modified_base 16: mod_base = OTHER; note = 2'-O-methyladenosine-3'-phosphate
  modified_base 17: mod_base = OTHER; note = 2'-O-methyladenosine-3'-phosphate
  modified_base 18: mod_base = OTHER; note = 2'-O-methylguanosine-3'-phosphate
  modified_base 19: mod_base = OTHER; note = 2'-O-methylguanosine-3'-phosphorothioate
  modified_base 20: mod_base = OTHER; note = 2'-O-methyladenosine-3'-phosphorothioate
  modified_base 21: mod_base = OTHER; note = 2'-O-methyladenosine
acacagacttgcttaaaggaa

SEQ ID NO: 994 - RNA, 21 nt, synthetic construct
  source 1..21: mol_type = other RNA
  modified_base 1: mod_base = OTHER; note = 2'-O-methylcytidine-3'-phosphorothioate
  modified_base 2: mod_base = OTHER; note = 2'-O-methyladenosine-3'-phosphorothioate
  modified_base 3: mod_base = OTHER; note = 2'-O-methylguanosine-3'-phosphate
  modified_base 4: mod_base = OTHER; note = 2'-O-methyladenosine-3'-phosphate
  modified_base 5: mod_base = OTHER; note = 2'-O-methylcytidine-3'-phosphate
  modified_base 6: mod_base = OTHER; note = 2'-O-hexadecyl-uridine-3'-phosphate
  modified_base 7: mod_base = OTHER; note = 2'-deoxy-2'-fluorouridine-3'-phosphate
  modified_base 8: mod_base = OTHER; note = 2'-O-methylguanosine-3'-phosphate
  modified_base 9: mod_base = OTHER; note = 2'-deoxy-2'-fluorocytidine-3'-phosphate
  modified_base 10: mod_base = OTHER; note = 2'-deoxy-2'-fluorouridine-3'-phosphate
  modified_base 11: mod_base = OTHER; note = 2'-deoxy-2'-fluorouridine-3'-phosphate
  modified_base 12: mod_base = OTHER; note = 2'-O-methyladenosine-3'-phosphate
  modified_base 13: mod_base = OTHER; note = 2'-O-methyladenosine-3'-phosphate
  modified_base 14: mod_base = OTHER; note = 2'-O-methyladenosine-3'-phosphate
  modified_base 15: mod_base = OTHER; note = 2'-O-methylguanosine-3'-phosphate
  modified_base 16: mod_base = OTHER; note = 2'-O-methylguanosine-3'-phosphate
  modified_base 17: mod_base = OTHER; note = 2'-O-methyladenosine-3'-phosphate
  modified_base 18: mod_base = OTHER; note = 2'-O-methyladenosine-3'-phosphate
  modified_base 19: mod_base = OTHER; note = 2'-O-methylguanosine-3'-phosphorothioate
  modified_base 20: mod_base = OTHER; note = 2'-O-methyluridine-3'-phosphorothioate
  modified_base 21: mod_base = OTHER; note = 2'-O-methyladenosine
cagacttgcttaaaggaagta

SEQ ID NO: 995 - RNA, 21 nt, synthetic construct
  source 1..21: mol_type = other RNA
  modified_base 1: mod_base = OTHER; note = 2'-O-methyladenosine-3'-phosphorothioate
  modified_base 2: mod_base = OTHER; note = 2'-O-methylguanosine-3'-phosphorothioate
  modified_base 3: mod_base = OTHER; note = 2'-O-methyladenosine-3'-phosphate
  modified_base 4: mod_base = OTHER; note = 2'-O-methylcytidine-3'-phosphate
  modified_base 5: mod_base = OTHER; note = 2'-O-methyluridine-3'-phosphate
  modified_base 6: mod_base = OTHER; note = 2'-O-hexadecyl-uridine-3'-phosphate
  modified_base 7: mod_base = OTHER; note = 2'-deoxy-2'-fluoroguanosine-3'-phosphate
  modified_base 8: mod_base = OTHER; note = 2'-O-methylcytidine-3'-phosphate
  modified_base 9: mod_base = OTHER; note = 2'-deoxy-2'-fluorouridine-3'-phosphate
  modified_base 10: mod_base = OTHER; note = 2'-deoxy-2'-fluorouridine-3'-phosphate
  modified_base 11: mod_base = OTHER; note = 2'-deoxy-2'-fluoroadenosine-3'-phosphate
  modified_base 12: mod_base = OTHER; note = 2'-O-methyladenosine-3'-phosphate
  modified_base 13: mod_base = OTHER; note = 2'-O-methyladenosine-3'-phosphate
  modified_base 14: mod_base = OTHER; note = 2'-O-methylguanosine-3'-phosphate
  modified_base 15: mod_base = OTHER; note = 2'-O-methylguanosine-3'-phosphate
  modified_base 16: mod_base = OTHER; note = 2'-O-methyladenosine-3'-phosphate
  modified_base 17: mod_base = OTHER; note = 2'-O-methyladenosine-3'-phosphate
  modified_base 18: mod_base = OTHER; note = 2'-O-methylguanosine-3'-phosphate
  modified_base 19: mod_base = OTHER; note = 2'-O-methyluridine-3'-phosphorothioate
  modified_base 20: mod_base = OTHER; note = 2'-O-methylguanosine-3'-phosphorothioate
  modified_base 21: mod_base = OTHER; note = 2'-O-methyladenosine
agacttgcttaaaggaagtga

SEQ ID NO: 996 - RNA, 23 nt, synthetic construct
  source 1..23: mol_type = other RNA
  modified_base 1: mod_base = OTHER; note = 2'-O-methyluridine-3'-phosphorothioate 5'-(E)-Vinylphosphonate
  modified_base 2: mod_base = OTHER; note = 2'-deoxy-2'-fluoroadenosine-3'-phosphorothioate
  modified_base 3: mod_base = OTHER; note = 2'-O-methylguanosine-3'-phosphate
  modified_base 4: mod_base = OTHER; note = 2'-O-methylcytidine-3'-phosphate
  modified_base 5: mod_base = OTHER; note = 2'-O-methylguanosine-3'-phosphate
  modified_base 6: mod_base = OTHER; note = 2'-O-methylguanosine-3'-phosphate
  modified_base 7: mod_base = OTHER; note = guanosine-2'-phosphate
  modified_base 8: mod_base = OTHER; note = 2'-O-methyladenosine-3'-phosphate
  modified_base 9: mod_base = OTHER; note = 2'-O-methylcytidine-3'-phosphate
  modified_base 10: mod_base = OTHER; note = 2'-O-methyladenosine-3'-phosphate
  modified_base 11: mod_base = OTHER; note = 2'-O-methylcytidine-3'-phosphate
  modified_base 12: mod_base = OTHER; note = 2'-O-methylcytidine-3'-phosphate
  modified_base 13: mod_base = OTHER; note = 2'-O-methylguanosine-3'-phosphate
  modified_base 14: mod_base = OTHER; note = 2'-deoxy-2'-fluorouridine-3'-phosphate
  modified_base 15: mod_base = OTHER; note = 2'-O-methyladenosine-3'-phosphate
  modified_base 16: mod_base = OTHER; note = 2'-deoxy-2'-fluoroguanosine-3'-phosphate
  modified_base 17: mod_base = OTHER; note = 2'-O-methylguanosine-3'-phosphate
  modified_base 18: mod_base = OTHER; note = 2'-O-methyluridine-3'-phosphate
  modified_base 19: mod_base = OTHER; note = 2'-O-methyluridine-3'-phosphate
  modified_base 20: mod_base = OTHER; note = 2'-O-methyladenosine-3'-phosphate
  modified_base 21: mod_base = OTHER; note = 2'-O-methylcytidine-3'-phosphorothioate
  modified_base 22: mod_base = OTHER; note = 2'-O-methylguanosine-3'-phosphorothioate
  modified_base 23: mod_base = OTHER; note = 2'-O-methyluridine
tagcgggacaccgtaggttacgt

SEQ ID NO: 997 - RNA, 23 nt, synthetic construct
  source 1..23: mol_type = other RNA
  modified_base 1: mod_base = OTHER; note = 2'-O-methyluridine-3'-phosphorothioate 5'-(E)-Vinylphosphonate
  modified_base 2: mod_base = OTHER; note = 2'-deoxy-2'-fluorocytidine-3'-phosphorothioate
  modified_base 3: mod_base = OTHER; note = 2'-O-methylcytidine-3'-phosphate
  modified_base 4: mod_base = OTHER; note = 2'-O-methyluridine-3'-phosphate
  modified_base 5: mod_base = OTHER; note = 2'-O-methylcytidine-3'-phosphate
  modified_base 6: mod_base = OTHER; note = 2'-O-methyluridine-3'-phosphate
  modified_base 7: mod_base = OTHER; note = cytidine-2'-phosphate
  modified_base 8: mod_base = OTHER; note = 2'-O-methyluridine-3'-phosphate
  modified_base 9: mod_base = OTHER; note = 2'-O-methyluridine-3'-phosphate
  modified_base 10: mod_base = OTHER; note = 2'-O-methyluridine-3'-phosphate
  modified_base 11: mod_base = OTHER; note = 2'-O-methylcytidine-3'-phosphate
  modified_base 12: mod_base = OTHER; note = 2'-O-methylcytidine-3'-phosphate
  modified_base 13: mod_base = OTHER; note = 2'-O-methyluridine-3'-phosphate
  modified_base 14: mod_base = OTHER; note = 2'-deoxy-2'-fluoroadenosine-3'-phosphate
  modified_base 15: mod_base = OTHER; note = 2'-O-methylguanosine-3'-phosphate
  modified_base 16: mod_base = OTHER; note = 2'-deoxy-2'-fluorocytidine-3'-phosphate
  modified_base 17: mod_base = OTHER; note = 2'-O-methylguanosine-3'-phosphate
  modified_base 18: mod_base = OTHER; note = 2'-O-methylguanosine-3'-phosphate
  modified_base 19: mod_base = OTHER; note = 2'-O-methylguanosine-3'-phosphate
  modified_base 20: mod_base = OTHER; note = 2'-O-methyladenosine-3'-phosphate
  modified_base 21: mod_base = OTHER; note = 2'-O-methylcytidine-3'-phosphorothioate
  modified_base 22: mod_base = OTHER; note = 2'-O-methyladenosine-3'-phosphorothioate
  modified_base 23: mod_base = OTHER; note = 2'-O-methylcytidine
tcctctctttcctagcgggacac

SEQ ID NO: 998 - RNA, 23 nt, synthetic construct
  source 1..23: mol_type = other RNA
  modified_base 1: mod_base = OTHER; note = 2'-O-methyluridine-3'-phosphorothioate 5'-(E)-Vinylphosphonate
  modified_base 2: mod_base = OTHER; note = 2'-deoxy-2'-fluorocytidine-3'-phosphorothioate
  modified_base 3: mod_base = OTHER; note = 2'-O-methyladenosine-3'-phosphate
  modified_base 4: mod_base = OTHER; note = 2'-O-methylcytidine-3'-phosphate
  modified_base 5: mod_base = OTHER; note = 2'-O-methylcytidine-3'-phosphate
  modified_base 6: mod_base = OTHER; note = 2'-O-methyluridine-3'-phosphate
  modified_base 7: mod_base = OTHER; note = cytidine-2'-phosphate
  modified_base 8: mod_base = OTHER; note = 2'-O-methyluridine-3'-phosphate
  modified_base 9: mod_base = OTHER; note = 2'-O-methylcytidine-3'-phosphate
  modified_base 10: mod_base = OTHER; note = 2'-O-methyluridine-3'-phosphate
  modified_base 11: mod_base = OTHER; note = 2'-O-methyluridine-3'-phosphate
  modified_base 12: mod_base = OTHER; note = 2'-O-methyluridine-3'-phosphate
  modified_base 13: mod_base = OTHER; note = 2'-O-methylcytidine-3'-phosphate
  modified_base 14: mod_base = OTHER; note = 2'-deoxy-2'-fluorocytidine-3'-phosphate
  modified_base 15: mod_base = OTHER; note = 2'-O-methyluridine-3'-phosphate
  modified_base 16: mod_base = OTHER; note = 2'-deoxy-2'-fluoroadenosine-3'-phosphate
  modified_base 17: mod_base = OTHER; note = 2'-O-methylguanosine-3'-phosphate
  modified_base 18: mod_base = OTHER; note = 2'-O-methylcytidine-3'-phosphate
  modified_base 19: mod_base = OTHER; note = 2'-O-methylguanosine-3'-phosphate
  modified_base 20: mod_base = OTHER; note = 2'-O-methylguanosine-3'-phosphate
  modified_base 21: mod_base = OTHER; note = 2'-O-methylguanosine-3'-phosphorothioate
  modified_base 22: mod_base = OTHER; note = 2'-O-methyladenosine-3'-phosphorothioate
  modified_base 23: mod_base = OTHER; note = 2'-O-methylcytidine
tcacctctctttcctagcgggac

SEQ ID NO: 999 - RNA, 23 nt, synthetic construct
  source 1..23: mol_type = other RNA
  modified_base 1: mod_base = OTHER; note = 2'-O-methyluridine-3'-phosphorothioate 5'-(E)-Vinylphosphonate
  modified_base 2: mod_base = OTHER; note = 2'-deoxy-2'-fluorocytidine-3'-phosphorothioate
  modified_base 3: mod_base = OTHER; note = 2'-O-methylguanosine-3'-phosphate
  modified_base 4: mod_base = OTHER; note = 2'-O-methylcytidine-3'-phosphate
  modified_base 5: mod_base = OTHER; note = 2'-O-methyladenosine-3'-phosphate
  modified_base 6: mod_base = OTHER; note = 2'-deoxy-2'-fluorocytidine-3'-phosphate
  modified_base 7: mod_base = OTHER; note = 2'-O-methylcytidine-3'-phosphate
  modified_base 8: mod_base = OTHER; note = 2'-deoxy-2'-fluorouridine-3'-phosphate
  modified_base 9: mod_base = OTHER; note = 2'-deoxy-2'-fluorocytidine-3'-phosphate
  modified_base 10: mod_base = OTHER; note = 2'-O-methyluridine-3'-phosphate
  modified_base 11: mod_base = OTHER; note = 2'-O-methylcytidine-3'-phosphate
  modified_base 12: mod_base = OTHER; note = 2'-O-methyluridine-3'-phosphate
  modified_base 13: mod_base = OTHER; note = 2'-O-methyluridine-3'-phosphate
  modified_base 14: mod_base = OTHER; note = 2'-deoxy-2'-fluorouridine-3'-phosphate
  modified_base 15: mod_base = OTHER; note = 2'-O-methylcytidine-3'-phosphate
  modified_base 16: mod_base = OTHER; note = 2'-deoxy-2'-fluorocytidine-3'-phosphate
  modified_base 17: mod_base = OTHER; note = 2'-O-methyluridine-3'-phosphate
  modified_base 18: mod_base = OTHER; note = 2'-O-methyladenosine-3'-phosphate
  modified_base 19: mod_base = OTHER; note = 2'-O-methylguanosine-3'-phosphate
  modified_base 20: mod_base = OTHER; note = 2'-O-methylcytidine-3'-phosphate
  modified_base 21: mod_base = OTHER; note = 2'-O-methylguanosine-3'-phosphorothioate
  modified_base 22: mod_base = OTHER; note = 2'-O-methylguanosine-3'-phosphorothioate
  modified_base 23: mod_base = OTHER; note = 2'-O-methylguanosine
tcgcacctctctttcctagcggg

SEQ ID NO: 1000 - RNA, 23 nt, synthetic construct
  source 1..23: mol_type = other RNA
  modified_base 1: mod_base = OTHER; note = 2'-O-methyluridine-3'-phosphorothioate 5'-(E)-Vinylphosphonate
  modified_base 2: mod_base = OTHER; note = 2'-deoxy-2'-fluoroadenosine-3'-phosphorothioate
  modified_base 3: mod_base = OTHER; note = 2'-O-methylcytidine-3'-phosphate
  modified_base 4: mod_base = OTHER; note = 2'-O-methylguanosine-3'-phosphate
  modified_base 5: mod_base = OTHER; note = 2'-O-methylcytidine-3'-phosphate
  modified_base 6: mod_base = OTHER; note = 2'-O-methyladenosine-3'-phosphate
  modified_base 7: mod_base = OTHER; note = cytidine-2'-phosphate
  modified_base 8: mod_base = OTHER; note = 2'-O-methylcytidine-3'-phosphate
  modified_base 9: mod_base = OTHER; note = 2'-O-methyluridine-3'-phosphate
  modified_base 10: mod_base = OTHER; note = 2'-O-methylcytidine-3'-phosphate
  modified_base 11: mod_base = OTHER; note = 2'-O-methyluridine-3'-phosphate
  modified_base 12: mod_base = OTHER; note = 2'-O-methylcytidine-3'-phosphate
  modified_base 13: mod_base = OTHER; note = 2'-O-methyluridine-3'-phosphate
  modified_base 14: mod_base = OTHER; note = 2'-deoxy-2'-fluorouridine-3'-phosphate
  modified_base 15: mod_base = OTHER; note = 2'-O-methyluridine-3'-phosphate
  modified_base 16: mod_base = OTHER; note = 2'-deoxy-2'-fluorocytidine-3'-phosphate
  modified_base 17: mod_base = OTHER; note = 2'-O-methylcytidine-3'-phosphate
  modified_base 18: mod_base = OTHER; note = 2'-O-methyluridine-3'-phosphate
  modified_base 19: mod_base = OTHER; note = 2'-O-methyladenosine-3'-phosphate
  modified_base 20: mod_base = OTHER; note = 2'-O-methylguanosine-3'-phosphate
  modified_base 21: mod_base = OTHER; note = 2'-O-methylcytidine-3'-phosphorothioate
  modified_base 22: mod_base = OTHER; note = 2'-O-methylguanosine-3'-phosphorothioate
  modified_base 23: mod_base = OTHER; note = 2'-O-methylguanosine
tacgcacctctctttcctagcgg

SEQ ID NO: 1001 - RNA, 23 nt, synthetic construct
  source 1..23: mol_type = other RNA
  modified_base 1: mod_base = OTHER; note = 2'-O-methyluridine-3'-phosphorothioate 5'-(E)-Vinylphosphonate
  modified_base 2: mod_base = OTHER; note = 2'-deoxy-2'-fluorouridine-3'-phosphorothioate
  modified_base 3: mod_base = OTHER; note = 2'-O-methylguanosine-3'-phosphate
  modified_base 4: mod_base = OTHER; note = 2'-O-methyladenosine-3'-phosphate
  modified_base 5: mod_base = OTHER; note = 2'-O-methylcytidine-3'-phosphate
  modified_base 6: mod_base = OTHER; note = 2'-O-methylguanosine-3'-phosphate
  modified_base 7: mod_base = OTHER; note = cytidine-2'-phosphate
  modified_base 8: mod_base = OTHER; note = 2'-O-methyladenosine-3'-phosphate
  modified_base 9: mod_base = OTHER; note = 2'-O-methylcytidine-3'-phosphate
  modified_base 10: mod_base = OTHER; note = 2'-O-methylcytidine-3'-phosphate
  modified_base 11: mod_base = OTHER; note = 2'-O-methyluridine-3'-phosphate
  modified_base 12: mod_base = OTHER; note = 2'-O-methylcytidine-3'-phosphate
  modified_base 13: mod_base = OTHER; note = 2'-O-methyluridine-3'-phosphate
  modified_base 14: mod_base = OTHER; note = 2'-deoxy-2'-fluorocytidine-3'-phosphate
  modified_base 15: mod_base = OTHER; note = 2'-O-methyluridine-3'-phosphate
  modified_base 16: mod_base = OTHER; note = 2'-deoxy-2'-fluorouridine-3'-phosphate
  modified_base 17: mod_base = OTHER; note = 2'-O-methyluridine-3'-phosphate
  modified_base 18: mod_base = OTHER; note = 2'-O-methylcytidine-3'-phosphate
  modified_base 19: mod_base = OTHER; note = 2'-O-methylcytidine-3'-phosphate
  modified_base 20: mod_base = OTHER; note = 2'-O-methyluridine-3'-phosphate
  modified_base 21: mod_base = OTHER; note = 2'-O-methyladenosine-3'-phosphorothioate
  modified_base 22: mod_base = OTHER; note = 2'-O-methylguanosine-3'-phosphorothioate
  modified_base 23: mod_base = OTHER; note = 2'-O-methylcytidine
ttgacgcacctctctttcctagc

SEQ ID NO: 1002 - RNA, 23 nt, synthetic construct
  source 1..23: mol_type = other RNA
  modified_base 1: mod_base = OTHER; note = 2'-O-methyluridine-3'-phosphorothioate 5'-(E)-Vinylphosphonate
  modified_base 2: mod_base = OTHER; note = 2'-deoxy-2'-fluorouridine-3'-phosphorothioate
  modified_base 3: mod_base = OTHER; note = 2'-O-methylguanosine-3'-phosphate
  modified_base 4: mod_base = OTHER; note = 2'-O-methyluridine-3'-phosphate
  modified_base 5: mod_base = OTHER; note = 2'-O-methylcytidine-3'-phosphate
  modified_base 6: mod_base = OTHER; note = 2'-O-methylguanosine-3'-phosphate
  modified_base 7: mod_base = OTHER; note = cytidine-2'-phosphate
  modified_base 8: mod_base = OTHER; note = 2'-O-methyluridine-3'-phosphate
  modified_base 9: mod_base = OTHER; note = 2'-O-methylguanosine-3'-phosphate
  modified_base 10: mod_base = OTHER; note = 2'-O-methyluridine-3'-phosphate
  modified_base 11: mod_base = OTHER; note = 2'-O-methyluridine-3'-phosphate
  modified_base 12: mod_base = OTHER; note = 2'-O-methyluridine-3'-phosphate
  modified_base 13: mod_base = OTHER; note = 2'-O-methylguanosine-3'-phosphate
  modified_base 14: mod_base = OTHER; note = 2'-deoxy-2'-fluoroadenosine-3'-phosphate
  modified_base 15: mod_base = OTHER; note = 2'-O-methylcytidine-3'-phosphate
  modified_base 16: mod_base = OTHER; note = 2'-deoxy-2'-fluoroguanosine-3'-phosphate
  modified_base 17: mod_base = OTHER; note = 2'-O-methylcytidine-3'-phosphate
  modified_base 18: mod_base = OTHER; note = 2'-O-methyladenosine-3'-phosphate
  modified_base 19: mod_base = OTHER; note = 2'-O-methylcytidine-3'-phosphate
  modified_base 20: mod_base = OTHER; note = 2'-O-methylcytidine-3'-phosphate
  modified_base 21: mod_base = OTHER; note = 2'-O-methyluridine-3'-phosphorothioate
  modified_base 22: mod_base = OTHER; note = 2'-O-methylcytidine-3'-phosphorothioate
  modified_base 23: mod_base = OTHER; note = 2'-O-methyluridine
ttgtcgctgtttgacgcacctct

SEQ ID NO: 1003 - RNA, 23 nt, synthetic construct
  source 1..23: mol_type = other RNA
  modified_base 1: mod_base = OTHER; note = 2'-O-methyluridine-3'-phosphorothioate 5'-(E)-Vinylphosphonate
  modified_base 2: mod_base = OTHER; note = 2'-deoxy-2'-fluorouridine-3'-phosphorothioate
  modified_base 3: mod_base = OTHER; note = 2'-O-methyluridine-3'-phosphate
  modified_base 4: mod_base = OTHER; note = 2'-O-methylguanosine-3'-phosphate
  modified_base 5: mod_base = OTHER; note = 2'-O-methyluridine-3'-phosphate
  modified_base 6: mod_base = OTHER; note = 2'-O-methylcytidine-3'-phosphate
  modified_base 7: mod_base = OTHER; note = guanosine-2'-phosphate
  modified_base 8: mod_base = OTHER; note = 2'-O-methylcytidine-3'-phosphate
  modified_base 9: mod_base = OTHER; note = 2'-O-methyluridine-3'-phosphate
  modified_base 10: mod_base = OTHER; note = 2'-O-methylguanosine-3'-phosphate
  modified_base 11: mod_base = OTHER; note = 2'-O-methyluridine-3'-phosphate
  modified_base 12: mod_base = OTHER; note = 2'-O-methyluridine-3'-phosphate
  modified_base 13: mod_base = OTHER; note = 2'-O-methyluridine-3'-phosphate
  modified_base 14: mod_base = OTHER; note = 2'-deoxy-2'-fluoroguanosine-3'-phosphate
  modified_base 15: mod_base = OTHER; note = 2'-O-methyladenosine-3'-phosphate
  modified_base 16: mod_base = OTHER; note = 2'-deoxy-2'-fluorocytidine-3'-phosphate
  modified_base 17: mod_base = OTHER; note = 2'-O-methylguanosine-3'-phosphate
  modified_base 18: mod_base = OTHER; note = 2'-O-methylcytidine-3'-phosphate
  modified_base 19: mod_base = OTHER; note = 2'-O-methyladenosine-3'-phosphate
  modified_base 20: mod_base = OTHER; note = 2'-O-methylcytidine-3'-phosphate
  modified_base 21: mod_base = OTHER; note = 2'-O-methylcytidine-3'-phosphorothioate
  modified_base 22: mod_base = OTHER; note = 2'-O-methyluridine-3'-phosphorothioate
  modified_base 23: mod_base = OTHER; note = 2'-O-methylcytidine
tttgtcgctgtttgacgcacctc

SEQ ID NO: 1004 - RNA, 23 nt, synthetic construct
  source 1..23: mol_type = other RNA
  modified_base 1: mod_base = OTHER; note = 2'-O-methyluridine-3'-phosphorothioate 5'-(E)-Vinylphosphonate
  modified_base 2: mod_base = OTHER; note = 2'-deoxy-2'-fluorocytidine-3'-phosphorothioate
  modified_base 3: mod_base = OTHER; note = 2'-O-methyluridine-3'-phosphate
  modified_base 4: mod_base = OTHER; note = 2'-O-methyluridine-3'-phosphate
  modified_base 5: mod_base = OTHER; note = 2'-O-methylguanosine-3'-phosphate
  modified_base 6: mod_base = OTHER; note = 2'-O-methyluridine-3'-phosphate
  modified_base 7: mod_base = OTHER; note = cytidine-2'-phosphate
  modified_base 8: mod_base = OTHER; note = 2'-O-methylguanosine-3'-phosphate
  modified_base 9: mod_base = OTHER; note = 2'-O-methylcytidine-3'-phosphate
  modified_base 10: mod_base = OTHER; note = 2'-O-methyluridine-3'-phosphate
  modified_base 11: mod_base = OTHER; note = 2'-O-methylguanosine-3'-phosphate
  modified_base 12: mod_base = OTHER; note = 2'-O-methyluridine-3'-phosphate
  modified_base 13: mod_base = OTHER; note = 2'-O-methyluridine-3'-phosphate
  modified_base 14: mod_base = OTHER; note = 2'-deoxy-2'-fluorouridine-3'-phosphate
  modified_base 15: mod_base = OTHER; note = 2'-O-methylguanosine-3'-phosphate
  modified_base 16: mod_base = OTHER; note = 2'-deoxy-2'-fluoroadenosine-3'-phosphate
  modified_base 17: mod_base = OTHER; note = 2'-O-methylcytidine-3'-phosphate
  modified_base 18: mod_base = OTHER; note = 2'-O-methylguanosine-3'-phosphate
  modified_base 19: mod_base = OTHER; note = 2'-O-methylcytidine-3'-phosphate
  modified_base 20: mod_base = OTHER; note = 2'-O-methyladenosine-3'-phosphate
  modified_base 21: mod_base = OTHER; note = 2'-O-methylcytidine-3'-phosphorothioate
  modified_base 22: mod_base = OTHER; note = 2'-O-methylcytidine-3'-phosphorothioate
  modified_base 23: mod_base = OTHER; note = 2'-O-methyluridine
tcttgtcgctgtttgacgcacct

SEQ ID NO: 1005 - RNA, 23 nt, synthetic construct
  source 1..23: mol_type = other RNA
  modified_base 1: mod_base = OTHER; note = 2'-O-methyluridine-3'-phosphorothioate 5'-(E)-Vinylphosphonate
  modified_base 2: mod_base = OTHER; note = 2'-deoxy-2'-fluoroadenosine-3'-phosphorothioate
  modified_base 3: mod_base = OTHER; note = 2'-O-methylcytidine-3'-phosphate
  modified_base 4: mod_base = OTHER; note = 2'-O-methyluridine-3'-phosphate
  modified_base 5: mod_base = OTHER; note = 2'-O-methyluridine-3'-phosphate
  modified_base 6: mod_base = OTHER; note = 2'-O-methylguanosine-3'-phosphate
  modified_base 7: mod_base = OTHER; note = Thymidine-glycol nucleic acid (GNA), S-Isomer
  modified_base 8: mod_base = OTHER; note = 2'-O-methylcytidine-3'-phosphate
  modified_base 9: mod_base = OTHER; note = 2'-O-methylguanosine-3'-phosphate
  modified_base 10: mod_base = OTHER; note = 2'-O-methylcytidine-3'-phosphate
  modified_base 11: mod_base = OTHER; note = 2'-O-methyluridine-3'-phosphate
  modified_base 12: mod_base = OTHER; note = 2'-O-methylguanosine-3'-phosphate
  modified_base 13: mod_base = OTHER; note = 2'-O-methyluridine-3'-phosphate
  modified_base 14: mod_base = OTHER; note = 2'-deoxy-2'-fluorouridine-3'-phosphate
  modified_base 15: mod_base = OTHER; note = 2'-O-methyluridine-3'-phosphate
  modified_base 16: mod_base = OTHER; note = 2'-deoxy-2'-fluoroguanosine-3'-phosphate
  modified_base 17: mod_base = OTHER; note = 2'-O-methyladenosine-3'-phosphate
  modified_base 18: mod_base = OTHER; note = 2'-O-methylcytidine-3'-phosphate
  modified_base 19: mod_base = OTHER; note = 2'-O-methylguanosine-3'-phosphate
  modified_base 20: mod_base = OTHER; note = 2'-O-methylcytidine-3'-phosphate
  modified_base 21: mod_base = OTHER; note = 2'-O-methyladenosine-3'-phosphorothioate
  modified_base 22: mod_base = OTHER; note = 2'-O-methylcytidine-3'-phosphorothioate
  modified_base 23: mod_base = OTHER; note = 2'-O-methylcytidine
tacttgtcgctgtttgacgcacc

SEQ ID NO: 1006 - RNA, 23 nt, synthetic construct
  source 1..23: mol_type = other RNA
  modified_base 1: mod_base = OTHER; note = 2'-O-methyluridine-3'-phosphorothioate 5'-(E)-Vinylphosphonate
  modified_base 2: mod_base = OTHER; note = 2'-deoxy-2'-fluoroadenosine-3'-phosphorothioate
  modified_base 3: mod_base = OTHER; note = 2'-O-methyladenosine-3'-phosphate
  modified_base 4: mod_base = OTHER; note = 2'-O-methylcytidine-3'-phosphate
  modified_base 5: mod_base = OTHER; note = 2'-O-methyluridine-3'-phosphate
  modified_base 6: mod_base = OTHER; note = 2'-O-methyluridine-3'-phosphate
  modified_base 7: mod_base = OTHER; note = guanosine-2'-phosphate
  modified_base 8: mod_base = OTHER; note = 2'-O-methyluridine-3'-phosphate
  modified_base 9: mod_base = OTHER; note = 2'-O-methylcytidine-3'-phosphate
  modified_base 10: mod_base = OTHER; note = 2'-O-methylguanosine-3'-phosphate
  modified_base 11: mod_base = OTHER; note = 2'-O-methylcytidine-3'-phosphate
  modified_base 12: mod_base = OTHER; note = 2'-O-methyluridine-3'-phosphate
  modified_base 13: mod_base = OTHER; note = 2'-O-methylguanosine-3'-phosphate
  modified_base 14: mod_base = OTHER; note = 2'-deoxy-2'-fluorouridine-3'-phosphate
  modified_base 15: mod_base = OTHER; note = 2'-O-methyluridine-3'-phosphate
  modified_base 16: mod_base = OTHER; note = 2'-deoxy-2'-fluorouridine-3'-phosphate
  modified_base 17: mod_base = OTHER; note = 2'-O-methylguanosine-3'-phosphate
  modified_base 18: mod_base = OTHER; note = 2'-O-methyladenosine-3'-phosphate
  modified_base 19: mod_base = OTHER; note = 2'-O-methylcytidine-3'-phosphate
  modified_base 20: mod_base = OTHER; note = 2'-O-methylguanosine-3'-phosphate
  modified_base 21: mod_base = OTHER; note = 2'-O-methylcytidine-3'-phosphorothioate
  modified_base 22: mod_base = OTHER; note = 2'-O-methyladenosine-3'-phosphorothioate
  modified_base 23: mod_base = OTHER; note = 2'-O-methylcytidine
taacttgtcgctgtttgacgcac

SEQ ID NO: 1007 - RNA, 23 nt, synthetic construct
  source 1..23: mol_type = other RNA
  modified_base 1: mod_base = OTHER; note = 2'-O-methyluridine-3'-phosphorothioate 5'-(E)-Vinylphosphonate
  modified_base 2: mod_base = OTHER; note = 2'-deoxy-2'-fluoroguanosine-3'-phosphorothioate
  modified_base 3: mod_base = OTHER; note = 2'-O-methyladenosine-3'-phosphate
  modified_base 4: mod_base = OTHER; note = 2'-O-methyladenosine-3'-phosphate
  modified_base 5: mod_base = OTHER; note = 2'-O-methylcytidine-3'-phosphate
  modified_base 6: mod_base = OTHER; note = 2'-O-methyluridine-3'-phosphate
  modified_base 7: mod_base = OTHER; note = Thymidine-glycol nucleic acid (GNA), S-Isomer
  modified_base 8: mod_base = OTHER; note = 2'-O-methylguanosine-3'-phosphate
  modified_base 9: mod_base = OTHER; note = 2'-O-methyluridine-3'-phosphate
  modified_base 10: mod_base = OTHER; note = 2'-O-methylcytidine-3'-phosphate
  modified_base 11: mod_base = OTHER; note = 2'-O-methylguanosine-3'-phosphate
  modified_base 12: mod_base = OTHER; note = 2'-O-methylcytidine-3'-phosphate
  modified_base 13: mod_base = OTHER; note = 2'-O-methyluridine-3'-phosphate
  modified_base 14: mod_base = OTHER; note = 2'-deoxy-2'-fluoroguanosine-3'-phosphate
  modified_base 15: mod_base = OTHER; note = 2'-O-methyluridine-3'-phosphate
  modified_base 16: mod_base = OTHER; note = 2'-deoxy-2'-fluorouridine-3'-phosphate
  modified_base 17: mod_base = OTHER; note = 2'-O-methyluridine-3'-phosphate
  modified_base 18: mod_base = OTHER; note = 2'-O-methylguanosine-3'-phosphate
  modified_base 19: mod_base = OTHER; note = 2'-O-methyladenosine-3'-phosphate
  modified_base 20: mod_base = OTHER; note = 2'-O-methylcytidine-3'-phosphate
  modified_base 21: mod_base = OTHER; note = 2'-O-methylguanosine-3'-phosphorothioate
  modified_base 22: mod_base = OTHER; note = 2'-O-methylcytidine-3'-phosphorothioate
  modified_base 23: mod_base = OTHER; note = 2'-O-methyladenosine
tgaacttgtcgctgtttgacgca

SEQ ID NO: 1008 - RNA, 23 nt, synthetic construct
  source 1..23: mol_type = other RNA
  modified_base 1: mod_base = OTHER; note = 2'-O-methyluridine-3'-phosphorothioate 5'-(E)-Vinylphosphonate
  modified_base 2: mod_base = OTHER; note = 2'-deoxy-2'-fluoroguanosine-3'-phosphorothioate
  modified_base 3: mod_base = OTHER; note = 2'-O-methylguanosine-3'-phosphate
  modified_base 4: mod_base = OTHER; note = 2'-O-methyladenosine-3'-phosphate
  modified_base 5: mod_base = OTHER; note = 2'-O-methyladenosine-3'-phosphate
  modified_base 6: mod_base = OTHER; note = 2'-O-methylcytidine-3'-phosphate
  modified_base 7: mod_base = OTHER; note = Thymidine-glycol nucleic acid (GNA), S-Isomer
  modified_base 8: mod_base = OTHER; note = 2'-O-methyluridine-3'-phosphate
  modified_base 9: mod_base = OTHER; note = 2'-O-methylguanosine-3'-phosphate
  modified_base 10: mod_base = OTHER; note = 2'-O-methyluridine-3'-phosphate
  modified_base 11: mod_base = OTHER; note = 2'-O-methylcytidine-3'-phosphate
  modified_base 12: mod_base = OTHER; note = 2'-O-methylguanosine-3'-phosphate
  modified_base 13: mod_base = OTHER; note = 2'-O-methylcytidine-3'-phosphate
  modified_base 14: mod_base = OTHER; note = 2'-deoxy-2'-fluorouridine-3'-phosphate
  modified_base 15: mod_base = OTHER; note = 2'-O-methylguanosine-3'-phosphate
  modified_base 16: mod_base = OTHER; note = 2'-deoxy-2'-fluorouridine-3'-phosphate
  modified_base 17: mod_base = OTHER; note = 2'-O-methyluridine-3'-phosphate
  modified_base 18: mod_base = OTHER; note = 2'-O-methyluridine-3'-phosphate
  modified_base 19: mod_base = OTHER; note = 2'-O-methylguanosine-3'-phosphate
  modified_base 20: mod_base = OTHER; note = 2'-O-methyladenosine-3'-phosphate
  modified_base 21: mod_base = OTHER; note = 2'-O-methylcytidine-3'-phosphorothioate
  modified_base 22: mod_base = OTHER; note = 2'-O-methylguanosine-3'-phosphorothioate
  modified_base 23: mod_base = OTHER; note = 2'-O-methylcytidine
tggaacttgtcgctgtttgacgc

SEQ ID NO: 1009 - RNA, 23 nt, synthetic construct
  source 1..23: mol_type = other RNA
  modified_base 1: mod_base = OTHER; note = 2'-O-methyluridine-3'-phosphorothioate 5'-(E)-Vinylphosphonate
  modified_base 2: mod_base = OTHER; note = 2'-deoxy-2'-fluorocytidine-3'-phosphorothioate
  modified_base 3: mod_base = OTHER; note = 2'-O-methylguanosine-3'-phosphate
  modified_base 4: mod_base = OTHER; note = 2'-O-methylguanosine-3'-phosphate
  modified_base 5: mod_base = OTHER; note = 2'-O-methyladenosine-3'-phosphate
  modified_base 6: mod_base = OTHER; note = 2'-deoxy-2'-fluoroadenosine-3'-phosphate
  modified_base 7: mod_base = OTHER; note = 2'-O-methylcytidine-3'-phosphate
  modified_base 8: mod_base = OTHER; note = 2'-deoxy-2'-fluorouridine-3'-phosphate
  modified_base 9: mod_base = OTHER; note = 2'-deoxy-2'-fluorouridine-3'-phosphate
  modified_base 10: mod_base = OTHER; note = 2'-O-methylguanosine-3'-phosphate
  modified_base 11: mod_base = OTHER; note = 2'-O-methyluridine-3'-phosphate
  modified_base 12: mod_base = OTHER; note = 2'-O-methylcytidine-3'-phosphate
  modified_base 13: mod_base = OTHER; note = 2'-O-methylguanosine-3'-phosphate
  modified_base 14: mod_base = OTHER; note = 2'-deoxy-2'-fluorocytidine-3'-phosphate
  modified_base 15: mod_base = OTHER; note = 2'-O-methyluridine-3'-phosphate
  modified_base 16: mod_base = OTHER; note = 2'-deoxy-2'-fluoroguanosine-3'-phosphate
  modified_base 17: mod_base = OTHER; note = 2'-O-methyluridine-3'-phosphate
  modified_base 18: mod_base = OTHER; note = 2'-O-methyluridine-3'-phosphate
  modified_base 19: mod_base = OTHER; note = 2'-O-methyluridine-3'-phosphate
  modified_base 20: mod_base = OTHER; note = 2'-O-methylguanosine-3'-phosphate
  modified_base 21: mod_base = OTHER; note = 2'-O-methyladenosine-3'-phosphorothioate
  modified_base 22: mod_base = OTHER; note = 2'-O-methylcytidine-3'-phosphorothioate
  modified_base 23: mod_base = OTHER; note = 2'-O-methylguanosine
tcggaacttgtcgctgtttgacg

SEQ ID NO: 1010 - RNA, 23 nt, synthetic construct
  source 1..23: mol_type = other RNA
  modified_base 1: mod_base = OTHER; note = 2'-O-methyluridine-3'-phosphorothioate 5'-(E)-Vinylphosphonate
  modified_base 2: mod_base = OTHER; note = 2'-deoxy-2'-fluoroguanosine-3'-phosphorothioate
  modified_base 3: mod_base = OTHER; note = 2'-O-methyluridine-3'-phosphate
  modified_base 4: mod_base = OTHER; note = 2'-O-methylcytidine-3'-phosphate
  modified_base 5: mod_base = OTHER; note = 2'-O-methyladenosine-3'-phosphate
  modified_base 6: mod_base = OTHER; note = 2'-O-methyluridine-3'-phosphate
  modified_base 7: mod_base = OTHER; note = cytidine-2'-phosphate
  modified_base 8: mod_base = OTHER; note = 2'-O-methyluridine-3'-phosphate
  modified_base 9: mod_base = OTHER; note = 2'-O-methyluridine-3'-phosphate
  modified_base 10: mod_base = OTHER; note = 2'-O-methyluridine-3'-phosphate
  modified_base 11: mod_base = OTHER; note = 2'-O-methyluridine-3'-phosphate
  modified_base 12: mod_base = OTHER; note = 2'-O-methyladenosine-3'-phosphate
  modified_base 13: mod_base = OTHER; note = 2'-O-methylcytidine-3'-phosphate
  modified_base 14: mod_base = OTHER; note = 2'-deoxy-2'-fluoroguanosine-3'-phosphate
  modified_base 15: mod_base = OTHER; note = 2'-O-methyluridine-3'-phosphate
  modified_base 16: mod_base = OTHER; note = 2'-deoxy-2'-fluoroguanosine-3'-phosphate
  modified_base 17: mod_base = OTHER; note = 2'-O-methylguanosine-3'-phosphate
  modified_base 18: mod_base = OTHER; note = 2'-O-methylguanosine-3'-phosphate
  modified_base 19: mod_base = OTHER; note = 2'-O-methylcytidine-3'-phosphate
  modified_base 20: mod_base = OTHER; note = 2'-O-methylguanosine-3'-phosphate
  modified_base 21: mod_base = OTHER; note = 2'-O-methylguanosine-3'-phosphorothioate
  modified_base 22: mod_base = OTHER; note = 2'-O-methyladenosine-3'-phosphorothioate
  modified_base 23: mod_base = OTHER; note = 2'-O-methyladenosine
tgtcatcttttacgtgggcggaa

SEQ ID NO: 1011 - RNA, 23 nt, synthetic construct
  source 1..23: mol_type = other RNA
  modified_base 1: mod_base = OTHER; note = 2'-O-methyluridine-3'-phosphorothioate 5'-(E)-Vinylphosphonate
  modified_base 2: mod_base = OTHER; note = 2'-deoxy-2'-fluoroadenosine-3'-phosphorothioate
  modified_base 3: mod_base = OTHER; note = 2'-O-methyladenosine-3'-phosphate
  modified_base 4: mod_base = OTHER; note = 2'-O-methylguanosine-3'-phosphate
  modified_base 5: mod_base = OTHER; note = 2'-O-methylcytidine-3'-phosphate
  modified_base 6: mod_base = OTHER; note = 2'-deoxy-2'-fluoroguanosine-3'-phosphate
  modified_base 7: mod_base = OTHER; note = 2'-O-methyluridine-3'-phosphate
  modified_base 8: mod_base = OTHER; note = 2'-deoxy-2'-fluorocytidine-3'-phosphate
  modified_base 9: mod_base = OTHER; note = 2'-deoxy-2'-fluoroadenosine-3'-phosphate
  modified_base 10: mod_base = OTHER; note = 2'-O-methyluridine-3'-phosphate
  modified_base 11: mod_base = OTHER; note = 2'-O-methylcytidine-3'-phosphate
  modified_base 12: mod_base = OTHER; note = 2'-O-methyluridine-3'-phosphate
  modified_base 13: mod_base = OTHER; note = 2'-O-methyluridine-3'-phosphate
  modified_base 14: mod_base = OTHER; note = 2'-deoxy-2'-fluorouridine-3'-phosphate
  modified_base 15: mod_base = OTHER; note = 2'-O-methyluridine-3'-phosphate
  modified_base 16: mod_base = OTHER; note = 2'-deoxy-2'-fluoroadenosine-3'-phosphate
  modified_base 17: mod_base = OTHER; note = 2'-O-methylcytidine-3'-phosphate
  modified_base 18: mod_base = OTHER; note = 2'-O-methylguanosine-3'-phosphate
  modified_base 19: mod_base = OTHER; note = 2'-O-methyluridine-3'-phosphate
  modified_base 20: mod_base = OTHER; note = 2'-O-methylguanosine-3'-phosphate
  modified_base 21: mod_base = OTHER; note = 2'-O-methylguanosine-3'-phosphorothioate
  modified_base 22: mod_base = OTHER; note = 2'-O-methylguanosine-3'-phosphorothioate
  modified_base 23: mod_base = OTHER; note = 2'-O-methylcytidine
taagcgtcatcttttacgtgggc

SEQ ID NO: 1012 - RNA, 23 nt, synthetic construct
  source 1..23: mol_type = other RNA
  modified_base 1: mod_base = OTHER; note = 2'-O-methyluridine-3'-phosphorothioate 5'-(E)-Vinylphosphonate
  modified_base 2: mod_base = OTHER; note = 2'-deoxy-2'-fluoroadenosine-3'-phosphorothioate
  modified_base 3: mod_base = OTHER; note = 2'-O-methyladenosine-3'-phosphate
  modified_base 4: mod_base = OTHER; note = 2'-O-methylguanosine-3'-phosphate
  modified_base 5: mod_base = OTHER; note = 2'-O-methylcytidine-3'-phosphate
  modified_base 6: mod_base = OTHER; note = 2'-O-methylguanosine-3'-phosphate
  modified_base 7: mod_base = OTHER; note = Thymidine-glycol nucleic acid (GNA), S-Isomer
  modified_base 8: mod_base = OTHER; note = 2'-O-methylcytidine-3'-phosphate
  modified_base 9: mod_base = OTHER; note = 2'-O-methyladenosine-3'-phosphate
  modified_base 10: mod_base = OTHER; note = 2'-O-methyluridine-3'-phosphate
  modified_base 11: mod_base = OTHER; note = 2'-O-methylcytidine-3'-phosphate
  modified_base 12: mod_base = OTHER; note = 2'-O-methyluridine-3'-phosphate
  modified_base 13: mod_base = OTHER; note = 2'-O-methyluridine-3'-phosphate
  modified_base 14: mod_base = OTHER; note = 2'-deoxy-2'-fluorouridine-3'-phosphate
  modified_base 15: mod_base = OTHER; note = 2'-O-methyluridine-3'-phosphate
  modified_base 16: mod_base = OTHER; note = 2'-deoxy-2'-fluoroadenosine-3'-phosphate
  modified_base 17: mod_base = OTHER; note = 2'-O-methylcytidine-3'-phosphate
  modified_base 18: mod_base = OTHER; note = 2'-O-methylguanosine-3'-phosphate
  modified_base 19: mod_base = OTHER; note = 2'-O-methyluridine-3'-phosphate
  modified_base 20: mod_base = OTHER; note = 2'-O-methylguanosine-3'-phosphate
  modified_base 21: mod_base = OTHER; note = 2'-O-methylguanosine-3'-phosphorothioate
  modified_base 22: mod_base = OTHER; note = 2'-O-methylguanosine-3'-phosphorothioate
  modified_base 23: mod_base = OTHER; note = 2'-O-methylcytidine
taagcgtcatcttttacgtgggc

SEQ ID NO: 1013 - RNA, 23 nt, synthetic construct
  source 1..23: mol_type = other RNA
  modified_base 1: mod_base = OTHER; note = 2'-O-methyluridine-3'-phosphorothioate 5'-(E)-Vinylphosphonate
  modified_base 2: mod_base = OTHER; note = 2'-deoxy-2'-fluorocytidine-3'-phosphorothioate
  modified_base 3: mod_base = OTHER; note = 2'-O-methyladenosine-3'-phosphate
  modified_base 4: mod_base = OTHER; note = 2'-O-methyladenosine-3'-phosphate
  modified_base 5: mod_base = OTHER; note = 2'-O-methylguanosine-3'-phosphate
  modified_base 6: mod_base = OTHER; note = 2'-deoxy-2'-fluorocytidine-3'-phosphate
  modified_base 7: mod_base = OTHER; note = 2'-O-methylguanosine-3'-phosphate
  modified_base 8: mod_base = OTHER; note = 2'-deoxy-2'-fluorouridine-3'-phosphate
  modified_base 9: mod_base = OTHER; note = 2'-deoxy-2'-fluorocytidine-3'-phosphate
  modified_base 10: mod_base = OTHER; note = 2'-O-methyladenosine-3'-phosphate
  modified_base 11: mod_base = OTHER; note = 2'-O-methyluridine-3'-phosphate
  modified_base 12: mod_base = OTHER; note = 2'-O-methylcytidine-3'-phosphate
  modified_base 13: mod_base = OTHER; note = 2'-O-methyluridine-3'-phosphate
  modified_base 14: mod_base = OTHER; note = 2'-deoxy-2'-fluorouridine-3'-phosphate
  modified_base 15: mod_base = OTHER; note = 2'-O-methyluridine-3'-phosphate
  modified_base 16: mod_base = OTHER; note = 2'-deoxy-2'-fluorouridine-3'-phosphate
  modified_base 17: mod_base = OTHER; note = 2'-O-methyladenosine-3'-phosphate
  modified_base 18: mod_base = OTHER; note = 2'-O-methylcytidine-3'-phosphate
  modified_base 19: mod_base = OTHER; note = 2'-O-methylguanosine-3'-phosphate
  modified_base 20: mod_base = OTHER; note = 2'-O-methyluridine-3'-phosphate
  modified_base 21: mod_base = OTHER; note = 2'-O-methylguanosine-3'-phosphorothioate
  modified_base 22: mod_base = OTHER; note = 2'-O-methylguanosine-3'-phosphorothioate
  modified_base 23: mod_base = OTHER; note = 2'-O-methylguanosine
tcaagcgtcatcttttacgtggg

SEQ ID NO: 1014 - RNA, 23 nt, synthetic construct
  source 1..23: mol_type = other RNA
  modified_base 1: mod_base = OTHER; note = 2'-O-methyluridine-3'-phosphorothioate 5'-(E)-Vinylphosphonate
  modified_base 2: mod_base = OTHER; note = 2'-deoxy-2'-fluorocytidine-3'-phosphorothioate
  modified_base 3: mod_base = OTHER; note = 2'-O-methylcytidine-3'-phosphate
  modified_base 4: mod_base = OTHER; note = 2'-O-methyladenosine-3'-phosphate
  modified_base 5: mod_base = OTHER; note = 2'-O-methyladenosine-3'-phosphate
  modified_base 6: mod_base = OTHER; note = 2'-O-methylguanosine-3'-phosphate
  modified_base 7: mod_base = OTHER; note = cytidine-2'-phosphate
  modified_base 8: mod_base = OTHER; note = 2'-O-methylguanosine-3'-phosphate
  modified_base 9: mod_base = OTHER; note = 2'-O-methyluridine-3'-phosphate
  modified_base 10: mod_base = OTHER; note = 2'-O-methylcytidine-3'-phosphate
  modified_base 11: mod_base = OTHER; note = 2'-O-methyladenosine-3'-phosphate
  modified_base 12: mod_base = OTHER; note = 2'-O-methyluridine-3'-phosphate
  modified_base 13: mod_base = OTHER; note = 2'-O-methylcytidine-3'-phosphate
  modified_base 14: mod_base = OTHER; note = 2'-deoxy-2'-fluorouridine-3'-phosphate
  modified_base 15: mod_base = OTHER; note = 2'-O-methyluridine-3'-phosphate
  modified_base 16: mod_base = OTHER; note = 2'-deoxy-2'-fluorouridine-3'-phosphate
  modified_base 17: mod_base = OTHER; note = 2'-O-methyluridine-3'-phosphate
  modified_base 18: mod_base = OTHER; note = 2'-O-methyladenosine-3'-phosphate
  modified_base 19: mod_base = OTHER; note = 2'-O-methylcytidine-3'-phosphate
  modified_base 20: mod_base = OTHER; note = 2'-O-methylguanosine-3'-phosphate
  modified_base 21: mod_base = OTHER; note = 2'-O-methyluridine-3'-phosphorothioate
  modified_base 22: mod_base = OTHER; note = 2'-O-methylguanosine-3'-phosphorothioate
  modified_base 23: mod_base = OTHER; note = 2'-O-methylguanosine
tccaagcgtcatcttttacgtgg

SEQ ID NO: 1015 - RNA, 23 nt, synthetic construct
  source 1..23: mol_type = other RNA
  modified_base 1: mod_base = OTHER; note = 2'-O-methyluridine-3'-phosphorothioate 5'-(E)-Vinylphosphonate
  modified_base 2: mod_base = OTHER; note = 2'-deoxy-2'-fluoroadenosine-3'-phosphorothioate
  modified_base 3: mod_base = OTHER; note = 2'-O-methylcytidine-3'-phosphate
  modified_base 4: mod_base = OTHER; note = 2'-O-methylcytidine-3'-phosphate
  modified_base 5: mod_base = OTHER; note = 2'-O-methyladenosine-3'-phosphate
  modified_base 6: mod_base = OTHER; note = 2'-O-methyladenosine-3'-phosphate
  modified_base 7: mod_base = OTHER; note = guanosine-2'-phosphate
  modified_base 8: mod_base = OTHER; note = 2'-O-methylcytidine-3'-phosphate
  modified_base 9: mod_base = OTHER; note = 2'-O-methylguanosine-3'-phosphate
  modified_base 10: mod_base = OTHER; note = 2'-O-methyluridine-3'-phosphate
  modified_base 11: mod_base = OTHER; note = 2'-O-methylcytidine-3'-phosphate
  modified_base 12: mod_base = OTHER; note = 2'-O-methyladenosine-3'-phosphate
  modified_base 13: mod_base = OTHER; note = 2'-O-methyluridine-3'-phosphate
  modified_base 14: mod_base = OTHER; note = 2'-deoxy-2'-fluorocytidine-3'-phosphate
  modified_base 15: mod_base = OTHER; note = 2'-O-methyluridine-3'-phosphate
  modified_base 16: mod_base = OTHER; note = 2'-deoxy-2'-fluorouridine-3'-phosphate
  modified_base 17: mod_base = OTHER; note = 2'-O-methyluridine-3'-phosphate
  modified_base 18: mod_base = OTHER; note = 2'-O-methyluridine-3'-phosphate
  modified_base 19: mod_base = OTHER; note = 2'-O-methyladenosine-3'-phosphate
  modified_base 20: mod_base = OTHER; note = 2'-O-methylcytidine-3'-phosphate
  modified_base 21: mod_base = OTHER; note = 2'-O-methylguanosine-3'-phosphorothioate
  modified_base 22: mod_base = OTHER; note = 2'-O-methyluridine-3'-phosphorothioate
  modified_base 23: mod_base = OTHER; note = 2'-O-methylguanosine
taccaagcgtcatcttttacgtg

SEQ ID NO: 1016 - RNA, 23 nt, synthetic construct
  source 1..23: mol_type = other RNA
  modified_base 1: mod_base = OTHER; note = 2'-O-methyluridine-3'-phosphorothioate 5'-(E)-Vinylphosphonate
  modified_base 2: mod_base = OTHER; note = 2'-deoxy-2'-fluorocytidine-3'-phosphorothioate
  modified_base 3: mod_base = OTHER; note = 2'-O-methyladenosine-3'-phosphate
  modified_base 4: mod_base = OTHER; note = 2'-O-methylcytidine-3'-phosphate
  modified_base 5: mod_base = OTHER; note = 2'-O-methylcytidine-3'-phosphate
  modified_base 6: mod_base = OTHER; note = 2'-deoxy-2'-fluoroadenosine-3'-phosphate
  modified_base 7: mod_base = OTHER; note = 2'-O-methyladenosine-3'-phosphate
  modified_base 8: mod_base = OTHER; note = 2'-deoxy-2'-fluoroguanosine-3'-phosphate
  modified_base 9: mod_base = OTHER; note = 2'-deoxy-2'-fluorocytidine-3'-phosphate
  modified_base 10: mod_base = OTHER; note = 2'-O-methylguanosine-3'-phosphate
  modified_base 11: mod_base = OTHER; note = 2'-O-methyluridine-3'-phosphate
  modified_base 12: mod_base = OTHER; note = 2'-O-methylcytidine-3'-phosphate
  modified_base 13: mod_base = OTHER; note = 2'-O-methyladenosine-3'-phosphate
  modified_base 14: mod_base = OTHER; note = 2'-deoxy-2'-fluorouridine-3'-phosphate
  modified_base 15: mod_base = OTHER; note = 2'-O-methylcytidine-3'-phosphate
  modified_base 16: mod_base = OTHER; note = 2'-deoxy-2'-fluorouridine-3'-phosphate
  modified_base 17: mod_base = OTHER; note = 2'-O-methyluridine-3'-phosphate
  modified_base 18: mod_base = OTHER; note = 2'-O-methyluridine-3'-phosphate
  modified_base 19: mod_base = OTHER; note = 2'-O-methyluridine-3'-phosphate
  modified_base 20: mod_base = OTHER; note = 2'-O-methyladenosine-3'-phosphate
  modified_base 21: mod_base = OTHER; note = 2'-O-methylcytidine-3'-phosphorothioate
  modified_base 22: mod_base = OTHER; note = 2'-O-methylguanosine-3'-phosphorothioate
  modified_base 23: mod_base = OTHER; note = 2'-O-methyluridine
tcaccaagcgtcatcttttacgt

SEQ ID NO: 1017 - RNA, 23 nt, synthetic construct
  source 1..23: mol_type = other RNA
  modified_base 1: mod_base = OTHER; note = 2'-O-methyluridine-3'-phosphorothioate 5'-(E)-Vinylphosphonate
  modified_base 2: mod_base = OTHER; note = 2'-deoxy-2'-fluoroadenosine-3'-phosphorothioate
  modified_base 3: mod_base = OTHER; note = 2'-O-methylcytidine-3'-phosphate
  modified_base 4: mod_base = OTHER; note = 2'-O-methyladenosine-3'-phosphate
  modified_base 5: mod_base = OTHER; note = 2'-O-methylcytidine-3'-phosphate
  modified_base 6: mod_base = OTHER; note = 2'-deoxy-2'-fluorocytidine-3'-phosphate
  modified_base 7: mod_base = OTHER; note = 2'-O-methyladenosine-3'-phosphate
  modified_base 8: mod_base = OTHER; note = 2'-deoxy-2'-fluoroadenosine-3'-phosphate
  modified_base 9: mod_base = OTHER; note = 2'-deoxy-2'-fluoroguanosine-3'-phosphate
  modified_base 10: mod_base = OTHER; note = 2'-O-methylcytidine-3'-phosphate
  modified_base 11: mod_base = OTHER; note = 2'-O-methylguanosine-3'-phosphate
  modified_base 12: mod_base = OTHER; note = 2'-O-methyluridine-3'-phosphate
  modified_base 13: mod_base = OTHER; note = 2'-O-methylcytidine-3'-phosphate
  modified_base 14: mod_base = OTHER; note = 2'-deoxy-2'-fluoroadenosine-3'-phosphate
  modified_base 15: mod_base = OTHER; note = 2'-O-methyluridine-3'-phosphate
  modified_base 16: mod_base = OTHER; note = 2'-deoxy-2'-fluorocytidine-3'-phosphate
  modified_base 17: mod_base = OTHER; note = 2'-O-methyluridine-3'-phosphate
  modified_base 18: mod_base = OTHER; note = 2'-O-methyluridine-3'-phosphate
  modified_base 19: mod_base = OTHER; note = 2'-O-methyluridine-3'-phosphate
  modified_base 20: mod_base = OTHER; note = 2'-O-methyluridine-3'-phosphate
  modified_base 21: mod_base = OTHER; note = 2'-O-methyladenosine-3'-phosphorothioate
  modified_base 22: mod_base = OTHER; note = 2'-O-methylcytidine-3'-phosphorothioate
  modified_base 23: mod_base = OTHER; note = 2'-O-methylguanosine
tacaccaagcgtcatcttttacg

SEQ ID NO: 1018 - RNA, 23 nt, synthetic construct
  source 1..23: mol_type = other RNA
  modified_base 1: mod_base = OTHER; note = 2'-O-methyluridine-3'-phosphorothioate 5'-(E)-Vinylphosphonate
  modified_base 2: mod_base = OTHER; note = 2'-deoxy-2'-fluorocytidine-3'-phosphorothioate
  modified_base 3: mod_base = OTHER; note = 2'-O-methyladenosine-3'-phosphate
  modified_base 4: mod_base = OTHER; note = 2'-O-methylcytidine-3'-phosphate
  modified_base 5: mod_base = OTHER; note = 2'-O-methyladenosine-3'-phosphate
  modified_base 6: mod_base = OTHER; note = 2'-deoxy-2'-fluorocytidine-3'-phosphate
  modified_base 7: mod_base = OTHER; note = 2'-O-methylcytidine-3'-phosphate
  modified_base 8: mod_base = OTHER; note = 2'-deoxy-2'-fluoroadenosine-3'-phosphate
  modified_base 9: mod_base = OTHER; note = 2'-deoxy-2'-fluoroadenosine-3'-phosphate
  modified_base 10: mod_base = OTHER; note = 2'-O-methylguanosine-3'-phosphate
  modified_base 11: mod_base = OTHER; note = 2'-O-methylcytidine-3'-phosphate
  modified_base 12: mod_base = OTHER; note = 2'-O-methylguanosine-3'-phosphate
  modified_base 13: mod_base = OTHER; note = 2'-O-methyluridine-3'-phosphate
  modified_base 14: mod_base = OTHER; note = 2'-deoxy-2'-fluorocytidine-3'-phosphate
  modified_base 15: mod_base = OTHER; note = 2'-O-methyladenosine-3'-phosphate
  modified_base 16: mod_base = OTHER; note = 2'-deoxy-2'-fluorouridine-3'-phosphate
  modified_base 17: mod_base = OTHER; note = 2'-O-methylcytidine-3'-phosphate
  modified_base 18: mod_base = OTHER; note = 2'-O-methyluridine-3'-phosphate
  modified_base 19: mod_base = OTHER; note = 2'-O-methyluridine-3'-phosphate
  modified_base 20: mod_base = OTHER; note = 2'-O-methyluridine-3'-phosphate
  modified_base 21: mod_base = OTHER; note = 2'-O-methyluridine-3'-phosphorothioate
  modified_base 22: mod_base = OTHER; note = 2'-O-methyladenosine-3'-phosphorothioate
  modified_base 23: mod_base = OTHER; note = 2'-O-methylcytidine
tcacaccaagcgtcatcttttac

SEQ ID NO: 1019 - RNA, 23 nt, synthetic construct
  source 1..23: mol_type = other RNA
  modified_base 1: mod_base = OTHER; note = 2'-O-methyluridine-3'-phosphorothioate 5'-(E)-Vinylphosphonate
  modified_base 2: mod_base = OTHER; note = 2'-deoxy-2'-fluoroadenosine-3'-phosphorothioate
  modified_base 3: mod_base = OTHER; note = 2'-O-methylcytidine-3'-phosphate
  modified_base 4: mod_base = OTHER; note = 2'-O-methyladenosine-3'-phosphate
  modified_base 5: mod_base = OTHER; note = 2'-O-methylcytidine-3'-phosphate
  modified_base 6: mod_base = OTHER; note = 2'-deoxy-2'-fluoroadenosine-3'-phosphate
  modified_base 7: mod_base = OTHER; note = 2'-O-methylcytidine-3'-phosphate
  modified_base 8: mod_base = OTHER; note = 2'-deoxy-2'-fluorocytidine-3'-phosphate
  modified_base 9: mod_base = OTHER; note = 2'-deoxy-2'-fluoroadenosine-3'-phosphate
  modified_base 10: mod_base = OTHER; note = 2'-O-methyladenosine-3'-phosphate
  modified_base 11: mod_base = OTHER; note = 2'-O-methylguanosine-3'-phosphate
  modified_base 12: mod_base = OTHER; note = 2'-O-methylcytidine-3'-phosphate
  modified_base 13: mod_base = OTHER; note = 2'-O-methylguanosine-3'-phosphate
  modified_base 14: mod_base = OTHER; note = 2'-deoxy-2'-fluorouridine-3'-phosphate
  modified_base 15: mod_base = OTHER; note = 2'-O-methylcytidine-3'-phosphate
  modified_base 16: mod_base = OTHER; note = 2'-deoxy-2'-fluoroadenosine-3'-phosphate
  modified_base 17: mod_base = OTHER; note = 2'-O-methyluridine-3'-phosphate
  modified_base 18: mod_base = OTHER; note = 2'-O-methylcytidine-3'-phosphate
  modified_base 19: mod_base = OTHER; note = 2'-O-methyluridine-3'-phosphate
  modified_base 20: mod_base = OTHER; note = 2'-O-methyluridine-3'-phosphate
  modified_base 21: mod_base = OTHER; note = 2'-O-methyluridine-3'-phosphorothioate
  modified_base 22: mod_base = OTHER; note = 2'-O-methyluridine-3'-phosphorothioate
  modified_base 23: mod_base = OTHER; note = 2'-O-methyladenosine
tacacaccaagcgtcatctttta

SEQ ID NO: 1020 - RNA, 23 nt, synthetic construct
  source 1..23: mol_type = other RNA
  modified_base 1: mod_base = OTHER; note = 2'-O-methyluridine-3'-phosphorothioate 5'-(E)-Vinylphosphonate
  modified_base 2: mod_base = OTHER; note = 2'-deoxy-2'-fluorouridine-3'-phosphorothioate
  modified_base 3: mod_base = OTHER; note = 2'-O-methylguanosine-3'-phosphate
  modified_base 4: mod_base = OTHER; note = 2'-O-methyladenosine-3'-phosphate
  modified_base 5: mod_base = OTHER; note = 2'-O-methylcytidine-3'-phosphate
  modified_base 6: mod_base = OTHER; note = 2'-O-methyladenosine-3'-phosphate
  modified_base 7: mod_base = OTHER; note = cytidine-2'-phosphate
  modified_base 8: mod_base = OTHER; note = 2'-O-methyladenosine-3'-phosphate
  modified_base 9: mod_base = OTHER; note = 2'-O-methylcytidine-3'-phosphate
  modified_base 10: mod_base = OTHER; note = 2'-O-methylcytidine-3'-phosphate
  modified_base 11: mod_base = OTHER; note = 2'-O-methyladenosine-3'-phosphate
  modified_base 12: mod_base = OTHER; note = 2'-O-methyladenosine-3'-phosphate
  modified_base 13: mod_base = OTHER; note = 2'-O-methylguanosine-3'-phosphate
  modified_base 14: mod_base = OTHER; note = 2'-deoxy-2'-fluorocytidine-3'-phosphate
  modified_base 15: mod_base = OTHER; note = 2'-O-methylguanosine-3'-phosphate
  modified_base 16: mod_base = OTHER; note = 2'-deoxy-2'-fluorouridine-3'-phosphate
  modified_base 17: mod_base = OTHER; note = 2'-O-methylcytidine-3'-phosphate
  modified_base 18: mod_base = OTHER; note = 2'-O-methyladenosine-3'-phosphate
  modified_base 19: mod_base = OTHER; note = 2'-O-methyluridine-3'-phosphate
  modified_base 20: mod_base = OTHER; note = 2'-O-methylcytidine-3'-phosphate
  modified_base 21: mod_base = OTHER; note = 2'-O-methyluridine-3'-phosphorothioate
  modified_base 22: mod_base = OTHER; note = 2'-O-methyluridine-3'-phosphorothioate
  modified_base 23: mod_base = OTHER; note = 2'-O-methyluridine
ttgacacaccaagcgtcatcttt

SEQ ID NO: 1021 - RNA, 23 nt, synthetic construct
  source 1..23: mol_type = other RNA
  modified_base 1: mod_base = OTHER; note = 2'-O-methyluridine-3'-phosphorothioate 5'-(E)-Vinylphosphonate
  modified_base 2: mod_base = OTHER; note = 2'-deoxy-2'-fluoroguanosine-3'-phosphorothioate
  modified_base 3: mod_base = OTHER; note = 2'-O-methylcytidine-3'-phosphate
  modified_base 4: mod_base = OTHER; note = 2'-O-methyluridine-3'-phosphate
  modified_base 5: mod_base = OTHER; note = 2'-O-methylguanosine-3'-phosphate
  modified_base 6: mod_base = OTHER; note = 2'-O-methyladenosine-3'-phosphate
  modified_base 7: mod_base = OTHER; note = cytidine-2'-phosphate
  modified_base 8: mod_base = OTHER; note = 2'-O-methyladenosine-3'-phosphate
  modified_base 9: mod_base = OTHER; note = 2'-O-methylcytidine-3'-phosphate
  modified_base 10: mod_base = OTHER; note = 2'-O-methyladenosine-3'-phosphate
  modified_base 11: mod_base = OTHER; note = 2'-O-methylcytidine-3'-phosphate
  modified_base 12: mod_base = OTHER; note = 2'-O-methylcytidine-3'-phosphate
  modified_base 13: mod_base = OTHER; note = 2'-O-methyladenosine-3'-phosphate
  modified_base 14: mod_base = OTHER; note = 2'-deoxy-2'-fluoroadenosine-3'-phosphate
  modified_base 15: mod_base = OTHER; note = 2'-O-methylguanosine-3'-phosphate
  modified_base 16: mod_base = OTHER; note = 2'-deoxy-2'-fluorocytidine-3'-phosphate
  modified_base 17: mod_base = OTHER; note = 2'-O-methylguanosine-3'-phosphate
  modified_base 18: mod_base = OTHER; note = 2'-O-methyluridine-3'-phosphate
  modified_base 19: mod_base = OTHER; note = 2'-O-methylcytidine-3'-phosphate
  modified_base 20: mod_base = OTHER; note = 2'-O-methyladenosine-3'-phosphate
  modified_base 21: mod_base = OTHER; note = 2'-O-methyluridine-3'-phosphorothioate
  modified_base 22: mod_base = OTHER; note = 2'-O-methylcytidine-3'-phosphorothioate
  modified_base 23: mod_base = OTHER; note = 2'-O-methyluridine
tgctgacacaccaagcgtcatct

SEQ ID NO: 1022 - RNA, 23 nt, synthetic construct
  source 1..23: mol_type = other RNA
  modified_base 1: mod_base = OTHER; note = 2'-O-methyluridine-3'-phosphorothioate 5'-(E)-Vinylphosphonate
  modified_base 2: mod_base = OTHER; note = 2'-deoxy-2'-fluorocytidine-3'-phosphorothioate
  modified_base 3: mod_base = OTHER; note = 2'-O-methylguanosine-3'-phosphate
  modified_base 4: mod_base = OTHER; note = 2'-O-methylguanosine-3'-phosphate
  modified_base 5: mod_base = OTHER; note = 2'-O-methylcytidine-3'-phosphate
  modified_base 6: mod_base = OTHER; note = 2'-O-methyluridine-3'-phosphate
  modified_base 7: mod_base = OTHER; note = guanosine-2'-phosphate
  modified_base 8: mod_base = OTHER; note = 2'-O-methyladenosine-3'-phosphate
  modified_base 9: mod_base = OTHER; note = 2'-O-methylcytidine-3'-phosphate
  modified_base 10: mod_base = OTHER; note = 2'-O-methyladenosine-3'-phosphate
  modified_base 11: mod_base = OTHER; note = 2'-O-methylcytidine-3'-phosphate
  modified_base 12: mod_base = OTHER; note = 2'-O-methyladenosine-3'-phosphate
  modified_base 13: mod_base = OTHER; note = 2'-O-methylcytidine-3'-phosphate
  modified_base 14: mod_base = OTHER; note = 2'-deoxy-2'-fluorocytidine-3'-phosphate
  modified_base 15: mod_base = OTHER; note = 2'-O-methyladenosine-3'-phosphate
  modified_base 16: mod_base = OTHER; note = 2'-deoxy-2'-fluoroadenosine-3'-phosphate
  modified_base 17: mod_base = OTHER; note = 2'-O-methylguanosine-3'-phosphate
  modified_base 18: mod_base = OTHER; note = 2'-O-methylcytidine-3'-phosphate
  modified_base 19: mod_base = OTHER; note = 2'-O-methylguanosine-3'-phosphate
  modified_base 20: mod_base = OTHER; note = 2'-O-methyluridine-3'-phosphate
  modified_base 21: mod_base = OTHER; note = 2'-O-methylcytidine-3'-phosphorothioate
  modified_base 22: mod_base = OTHER; note = 2'-O-methyladenosine-3'-phosphorothioate
  modified_base 23: mod_base = OTHER; note = 2'-O-methyluridine
tcggctgacacaccaagcgtcat

SEQ ID NO: 1023 - RNA, 23 nt, synthetic construct
  source 1..23: mol_type = other RNA
  modified_base 1: mod_base = OTHER; note = 2'-O-methyluridine-3'-phosphorothioate 5'-(E)-Vinylphosphonate
  modified_base 2: mod_base = OTHER; note = 2'-deoxy-2'-fluoroadenosine-3'-phosphorothioate
  modified_base 3: mod_base = OTHER; note = 2'-O-methyladenosine-3'-phosphate
  modified_base 4: mod_base = OTHER; note = 2'-O-methylguanosine-3'-phosphate
  modified_base 5: mod_base = OTHER; note = 2'-O-methyladenosine-3'-phosphate
  modified_base 6: mod_base = OTHER; note = 2'-deoxy-2'-fluoroguanosine-3'-phosphate
  modified_base 7: mod_base = OTHER; note = 2'-O-methyladenosine-3'-phosphate
  modified_base 8: mod_base = OTHER; note = 2'-deoxy-2'-fluoroadenosine-3'-phosphate
  modified_base 9: mod_base = OTHER; note = 2'-deoxy-2'-fluoroguanosine-3'-phosphate
  modified_base 10: mod_base = OTHER; note = 2'-O-methylcytidine-3'-phosphate
  modified_base 11: mod_base = OTHER; note = 2'-O-methyladenosine-3'-phosphate
  modified_base 12: mod_base = OTHER; note = 2'-O-methyladenosine-3'-phosphate
  modified_base 13: mod_base = OTHER; note = 2'-O-methylcytidine-3'-phosphate
  modified_base 14: mod_base = OTHER; note = 2'-deoxy-2'-fluorocytidine-3'-phosphate
  modified_base 15: mod_base = OTHER; note = 2'-O-methylguanosine-3'-phosphate
  modified_base 16: mod_base = OTHER; note = 2'-deoxy-2'-fluoroguanosine-3'-phosphate
  modified_base 17: mod_base = OTHER; note = 2'-O-methylguanosine-3'-phosphate
  modified_base 18: mod_base = OTHER; note = 2'-O-methylcytidine-3'-phosphate
  modified_base 19: mod_base = OTHER; note = 2'-O-methyladenosine-3'-phosphate
  modified_base 20: mod_base = OTHER; note = 2'-O-methylguanosine-3'-phosphate
  modified_base 21: mod_base = OTHER; note = 2'-O-methylcytidine-3'-phosphorothioate
  modified_base 22: mod_base = OTHER; note = 2'-O-methyladenosine-3'-phosphorothioate
  modified_base 23: mod_base = OTHER; note = 2'-O-methylguanosine
taagagaagcaaccgggcagcag

SEQ ID NO: 1024 - RNA, 23 nt, synthetic construct
  source 1..23: mol_type = other RNA
  modified_base 1: mod_base = OTHER; note = 2'-O-methyluridine-3'-phosphorothioate 5'-(E)-Vinylphosphonate
  modified_base 2: mod_base = OTHER; note = 2'-deoxy-2'-fluorocytidine-3'-phosphorothioate
  modified_base 3: mod_base = OTHER; note = 2'-O-methyladenosine-3'-phosphate
  modified_base 4: mod_base = OTHER; note = 2'-O-methylcytidine-3'-phosphate
  modified_base 5: mod_base = OTHER; note = 2'-O-methyladenosine-3'-phosphate
  modified_base 6: mod_base = OTHER; note = 2'-deoxy-2'-fluorocytidine-3'-phosphate
  modified_base 7: mod_base = OTHER; note = 2'-O-methylcytidine-3'-phosphate
  modified_base 8: mod_base = OTHER; note = 2'-deoxy-2'-fluorouridine-3'-phosphate
  modified_base 9: mod_base = OTHER; note = 2'-deoxy-2'-fluoroguanosine-3'-phosphate
  modified_base 10: mod_base = OTHER; note = 2'-O-methylcytidine-3'-phosphate
  modified_base 11: mod_base = OTHER; note = 2'-O-methyluridine-3'-phosphate
  modified_base 12: mod_base = OTHER; note = 2'-O-methylcytidine-3'-phosphate
  modified_base 13: mod_base = OTHER; note = 2'-O-methyluridine-3'-phosphate
  modified_base 14: mod_base = OTHER; note = 2'-deoxy-2'-fluorouridine-3'-phosphate
  modified_base 15: mod_base = OTHER; note = 2'-O-methylguanosine-3'-phosphate
  modified_base 16: mod_base = OTHER; note = 2'-deoxy-2'-fluorocytidine-3'-phosphate
  modified_base 17: mod_base = OTHER; note = 2'-O-methyluridine-3'-phosphate
  modified_base 18: mod_base = OTHER; note = 2'-O-methyladenosine-3'-phosphate
  modified_base 19: mod_base = OTHER; note = 2'-O-methylguanosine-3'-phosphate
  modified_base 20: mod_base = OTHER; note = 2'-O-methyladenosine-3'-phosphate
  modified_base 21: mod_base = OTHER; note = 2'-O-methylcytidine-3'-phosphorothioate
  modified_base 22: mod_base = OTHER; note = 2'-O-methylcytidine-3'-phosphorothioate
  modified_base 23: mod_base = OTHER; note = 2'-O-methylcytidine
tcacacctgctcttgctagaccc

SEQ ID NO: 1025 - RNA, 23 nt, synthetic construct
  source 1..23: mol_type = other RNA
  modified_base 1: mod_base = OTHER; note = 2'-O-methyluridine-3'-phosphorothioate 5'-(E)-Vinylphosphonate
  modified_base 2: mod_base = OTHER; note = 2'-deoxy-2'-fluorocytidine-3'-phosphorothioate
  modified_base 3: mod_base = OTHER; note = 2'-O-methylcytidine-3'-phosphate
  modified_base 4: mod_base = OTHER; note = 2'-O-methyluridine-3'-phosphate
  modified_base 5: mod_base = OTHER; note = 2'-O-methylcytidine-3'-phosphate
  modified_base 6: mod_base = OTHER; note = 2'-deoxy-2'-fluorocytidine-3'-phosphate
  modified_base 7: mod_base = OTHER; note = 2'-O-methyluridine-3'-phosphate
  modified_base 8: mod_base = OTHER; note = 2'-deoxy-2'-fluoroadenosine-3'-phosphate
  modified_base 9: mod_base = OTHER; note = 2'-deoxy-2'-fluoroadenosine-3'-phosphate
  modified_base 10: mod_base = OTHER; note = 2'-O-methyladenosine-3'-phosphate
  modified_base 11: mod_base = OTHER; note = 2'-O-methylcytidine-3'-phosphate
  modified_base 12: mod_base = OTHER; note = 2'-O-methylcytidine-3'-phosphate
  modified_base 13: mod_base = OTHER; note = 2'-O-methylcytidine-3'-phosphate
  modified_base 14: mod_base = OTHER; note = 2'-deoxy-2'-fluoroadenosine-3'-phosphate
  modified_base 15: mod_base = OTHER; note = 2'-O-methylcytidine-3'-phosphate
  modified_base 16: mod_base = OTHER; note = 2'-deoxy-2'-fluoroadenosine-3'-phosphate
  modified_base 17: mod_base = OTHER; note = 2'-O-methylcytidine-3'-phosphate
  modified_base 18: mod_base = OTHER; note = 2'-O-methylcytidine-3'-phosphate
  modified_base 19: mod_base = OTHER; note = 2'-O-methyluridine-3'-phosphate
  modified_base 20: mod_base = OTHER; note = 2'-O-methylguanosine-3'-phosphate
  modified_base 21: mod_base = OTHER; note = 2'-O-methylcytidine-3'-phosphorothioate
  modified_base 22: mod_base = OTHER; note = 2'-O-methyluridine-3'-phosphorothioate
  modified_base 23: mod_base = OTHER; note = 2'-O-methylcytidine
tcctcctaaacccacacctgctc

SEQ ID NO: 1026 - RNA, 23 nt, synthetic construct
  source 1..23: mol_type = other RNA
  modified_base 1: mod_base = OTHER; note = 2'-O-methyluridine-3'-phosphorothioate 5'-(E)-Vinylphosphonate
  modified_base 2: mod_base = OTHER; note = 2'-deoxy-2'-fluoroadenosine-3'-phosphorothioate
  modified_base 3: mod_base = OTHER; note = 2'-O-methylcytidine-3'-phosphate
  modified_base 4: mod_base = OTHER; note = 2'-O-methylcytidine-3'-phosphate
  modified_base 5: mod_base = OTHER; note = 2'-O-methyluridine-3'-phosphate
  modified_base 6: mod_base = OTHER; note = 2'-O-methylcytidine-3'-phosphate
  modified_base 7: mod_base = OTHER; note = cytidine-2'-phosphate
  modified_base 8: mod_base = OTHER; note = 2'-O-methyluridine-3'-phosphate
  modified_base 9: mod_base = OTHER; note = 2'-O-methyladenosine-3'-phosphate
  modified_base 10: mod_base = OTHER; note = 2'-O-methyladenosine-3'-phosphate
  modified_base 11: mod_base = OTHER; note = 2'-O-methyladenosine-3'-phosphate
  modified_base 12: mod_base = OTHER; note = 2'-O-methylcytidine-3'-phosphate
  modified_base 13: mod_base = OTHER; note = 2'-O-methylcytidine-3'-phosphate
  modified_base 14: mod_base = OTHER; note = 2'-deoxy-2'-fluorocytidine-3'-phosphate
  modified_base 15: mod_base = OTHER; note = 2'-O-methyladenosine-3'-phosphate
  modified_base 16: mod_base = OTHER; note = 2'-deoxy-2'-fluorocytidine-3'-phosphate
  modified_base 17: mod_base = OTHER; note = 2'-O-methyladenosine-3'-phosphate
  modified_base 18: mod_base = OTHER; note = 2'-O-methylcytidine-3'-phosphate
  modified_base 19: mod_base = OTHER; note = 2'-O-methylcytidine-3'-phosphate
  modified_base 20: mod_base = OTHER; note = 2'-O-methyluridine-3'-phosphate
  modified_base 21: mod_base = OTHER; note = 2'-O-methylguanosine-3'-phosphorothioate
  modified_base 22: mod_base = OTHER; note = 2'-O-methylcytidine-3'-phosphorothioate
  modified_base 23: mod_base = OTHER; note = 2'-O-methyluridine
tacctcctaaacccacacctgct

SEQ ID NO: 1027 - RNA, 23 nt, synthetic construct
  source 1..23: mol_type = other RNA
  modified_base 1: mod_base = OTHER; note = 2'-O-methyluridine-3'-phosphorothioate 5'-(E)-Vinylphosphonate
  modified_base 2: mod_base = OTHER; note = 2'-deoxy-2'-fluorocytidine-3'-phosphorothioate
  modified_base 3: mod_base = OTHER; note = 2'-O-methyladenosine-3'-phosphate
  modified_base 4: mod_base = OTHER; note = 2'-O-methylcytidine-3'-phosphate
  modified_base 5: mod_base = OTHER; note = 2'-O-methylcytidine-3'-phosphate
  modified_base 6: mod_base = OTHER; note = 2'-deoxy-2'-fluorouridine-3'-phosphate
  modified_base 7: mod_base = OTHER; note = 2'-O-methylcytidine-3'-phosphate
  modified_base 8: mod_base = OTHER; note = 2'-deoxy-2'-fluorocytidine-3'-phosphate
  modified_base 9: mod_base = OTHER; note = 2'-deoxy-2'-fluorouridine-3'-phosphate
  modified_base 10: mod_base = OTHER; note = 2'-O-methyladenosine-3'-phosphate
  modified_base 11: mod_base = OTHER; note = 2'-O-methyladenosine-3'-phosphate
  modified_base 12: mod_base = OTHER; note = 2'-O-methyladenosine-3'-phosphate
  modified_base 13: mod_base = OTHER; note = 2'-O-methylcytidine-3'-phosphate
  modified_base 14: mod_base = OTHER; note = 2'-deoxy-2'-fluorocytidine-3'-phosphate
  modified_base 15: mod_base = OTHER; note = 2'-O-methylcytidine-3'-phosphate
  modified_base 16: mod_base = OTHER; note = 2'-deoxy-2'-fluoroadenosine-3'-phosphate
  modified_base 17: mod_base = OTHER; note = 2'-O-methylcytidine-3'-phosphate
  modified_base 18: mod_base = OTHER; note = 2'-O-methyladenosine-3'-phosphate
  modified_base 19: mod_base = OTHER; note = 2'-O-methylcytidine-3'-phosphate
  modified_base 20: mod_base = OTHER; note = 2'-O-methylcytidine-3'-phosphate
  modified_base 21: mod_base = OTHER; note = 2'-O-methyluridine-3'-phosphorothioate
  modified_base 22: mod_base = OTHER; note = 2'-O-methylguanosine-3'-phosphorothioate
  modified_base 23: mod_base = OTHER; note = 2'-O-methylcytidine
tcacctcctaaacccacacctgc

SEQ ID NO: 1028 - RNA, 23 nt, synthetic construct
  source 1..23: mol_type = other RNA
  modified_base 1: mod_base = OTHER; note = 2'-O-methyluridine-3'-phosphorothioate 5'-(E)-Vinylphosphonate
  modified_base 2: mod_base = OTHER; note = 2'-deoxy-2'-fluorocytidine-3'-phosphorothioate
  modified_base 3: mod_base = OTHER; note = 2'-O-methyladenosine-3'-phosphate
  modified_base 4: mod_base = OTHER; note = 2'-O-methylcytidine-3'-phosphate
  modified_base 5: mod_base = OTHER; note = 2'-O-methyladenosine-3'-phosphate
  modified_base 6: mod_base = OTHER; note = 2'-deoxy-2'-fluorocytidine-3'-phosphate
  modified_base 7: mod_base = OTHER; note = 2'-O-methylcytidine-3'-phosphate
  modified_base 8: mod_base = OTHER; note = 2'-deoxy-2'-fluorouridine-3'-phosphate
  modified_base 9: mod_base = OTHER; note = 2'-deoxy-2'-fluorocytidine-3'-phosphate
  modified_base 10: mod_base = OTHER; note = 2'-O-methylcytidine-3'-phosphate
  modified_base 11: mod_base = OTHER; note = 2'-O-methyluridine-3'-phosphate
  modified_base 12: mod_base = OTHER; note = 2'-O-methyladenosine-3'-phosphate
  modified_base 13: mod_base = OTHER; note = 2'-O-methyladenosine-3'-phosphate
  modified_base 14: mod_base = OTHER; note = 2'-deoxy-2'-fluoroadenosine-3'-phosphate
  modified_base 15: mod_base = OTHER; note = 2'-O-methylcytidine-3'-phosphate
  modified_base 16: mod_base = OTHER; note = 2'-deoxy-2'-fluorocytidine-3'-phosphate
  modified_base 17: mod_base = OTHER; note = 2'-O-methylcytidine-3'-phosphate
  modified_base 18: mod_base = OTHER; note = 2'-O-methyladenosine-3'-phosphate
  modified_base 19: mod_base = OTHER; note = 2'-O-methylcytidine-3'-phosphate
  modified_base 20: mod_base = OTHER; note = 2'-O-methyladenosine-3'-phosphate
  modified_base 21: mod_base = OTHER; note = 2'-O-methylcytidine-3'-phosphorothioate
  modified_base 22: mod_base = OTHER; note = 2'-O-methylcytidine-3'-phosphorothioate
  modified_base 23: mod_base = OTHER; note = 2'-O-methyluridine
tcacacctcctaaacccacacct

SEQ ID NO: 1029 - RNA, 23 nt, synthetic construct
  source 1..23: mol_type = other RNA
  modified_base 1: mod_base = OTHER; note = 2'-O-methyluridine-3'-phosphorothioate 5'-(E)-Vinylphosphonate
  modified_base 2: mod_base = OTHER; note = 2'-deoxy-2'-fluorocytidine-3'-phosphorothioate
  modified_base 3: mod_base = OTHER; note = 2'-O-methyladenosine-3'-phosphate
  modified_base 4: mod_base = OTHER; note = 2'-O-methylguanosine-3'-phosphate
  modified_base 5: mod_base = OTHER; note = 2'-O-methylcytidine-3'-phosphate
  modified_base 6: mod_base = OTHER; note = 2'-deoxy-2'-fluoroguanosine-3'-phosphate
  modified_base 7: mod_base = OTHER; note = 2'-O-methyladenosine-3'-phosphate
  modified_base 8: mod_base = OTHER; note = 2'-deoxy-2'-fluoroguanosine-3'-phosphate
  modified_base 9: mod_base = OTHER; note = 2'-deoxy-2'-fluorouridine-3'-phosphate
  modified_base 10: mod_base = OTHER; note = 2'-O-methyladenosine-3'-phosphate
  modified_base 11: mod_base = OTHER; note = 2'-O-methylcytidine-3'-phosphate
  modified_base 12: mod_base = OTHER; note = 2'-O-methyluridine-3'-phosphate
  modified_base 13: mod_base = OTHER; note = 2'-O-methylguanosine-3'-phosphate
  modified_base 14: mod_base = OTHER; note = 2'-deoxy-2'-fluorouridine-3'-phosphate
  modified_base 15: mod_base = OTHER; note = 2'-O-methylguanosine-3'-phosphate
  modified_base 16: mod_base = OTHER; note = 2'-deoxy-2'-fluoroadenosine-3'-phosphate
  modified_base 17: mod_base = OTHER; note = 2'-O-methylguanosine-3'-phosphate
  modified_base 18: mod_base = OTHER; note = 2'-O-methyladenosine-3'-phosphate
  modified_base 19: mod_base = OTHER; note = 2'-O-methylguanosine-3'-phosphate
  modified_base 20: mod_base = OTHER; note = 2'-O-methylcytidine-3'-phosphate
  modified_base 21: mod_base = OTHER; note = 2'-O-methyladenosine-3'-phosphorothioate
  modified_base 22: mod_base = OTHER; note = 2'-O-methyladenosine-3'-phosphorothioate
  modified_base 23: mod_base = OTHER; note = 2'-O-methylguanosine
tcagcgagtactgtgagagcaag

SEQ ID NO: 1030 - RNA, 23 nt, synthetic construct
  source 1..23: mol_type = other RNA
  modified_base 1: mod_base = OTHER; note = 2'-O-methyluridine-3'-phosphorothioate 5'-(E)-Vinylphosphonate
  modified_base 2: mod_base = OTHER; note = 2'-deoxy-2'-fluorocytidine-3'-phosphorothioate
  modified_base 3: mod_base = OTHER; note = 2'-O-methylcytidine-3'-phosphate
  modified_base 4: mod_base = OTHER; note = 2'-O-methyluridine-3'-phosphate
  modified_base 5: mod_base = OTHER; note = 2'-O-methylcytidine-3'-phosphate
  modified_base 6: mod_base = OTHER; note = 2'-O-methyladenosine-3'-phosphate
  modified_base 7: mod_base = OTHER; note = guanosine-2'-phosphate
  modified_base 8: mod_base = OTHER; note = 2'-O-methylcytidine-3'-phosphate
  modified_base 9: mod_base = OTHER; note = 2'-O-methylguanosine-3'-phosphate
  modified_base 10: mod_base = OTHER; note = 2'-O-methyladenosine-3'-phosphate
  modified_base 11: mod_base = OTHER; note = 2'-O-methylguanosine-3'-phosphate
  modified_base 12: mod_base = OTHER; note = 2'-O-methyluridine-3'-phosphate
  modified_base 13: mod_base = OTHER; note = 2'-O-methyladenosine-3'-phosphate
  modified_base 14: mod_base = OTHER; note = 2'-deoxy-2'-fluorocytidine-3'-phosphate
  modified_base 15: mod_base = OTHER; note = 2'-O-methyluridine-3'-phosphate
  modified_base 16: mod_base = OTHER; note = 2'-deoxy-2'-fluoroguanosine-3'-phosphate
  modified_base 17: mod_base = OTHER; note = 2'-O-methyluridine-3'-phosphate
  modified_base 18: mod_base = OTHER; note = 2'-O-methylguanosine-3'-phosphate
  modified_base 19: mod_base = OTHER; note = 2'-O-methyladenosine-3'-phosphate
  modified_base 20: mod_base = OTHER; note = 2'-O-methylguanosine-3'-phosphate
  modified_base 21: mod_base = OTHER; note = 2'-O-methyladenosine-3'-phosphorothioate
  modified_base 22: mod_base = OTHER; note = 2'-O-methylguanosine-3'-phosphorothioate
  modified_base 23: mod_base = OTHER; note = 2'-O-methylcytidine
tcctcagcgagtactgtgagagc

SEQ ID NO: 1031 - RNA, 23 nt, synthetic construct
  source 1..23: mol_type = other RNA
  modified_base 1: mod_base = OTHER; note = 2'-O-methyluridine-3'-phosphorothioate 5'-(E)-Vinylphosphonate
  modified_base 2: mod_base = OTHER; note = 2'-deoxy-2'-fluoroadenosine-3'-phosphorothioate
  modified_base 3: mod_base = OTHER; note = 2'-O-methylcytidine-3'-phosphate
  modified_base 4: mod_base = OTHER; note = 2'-O-methylcytidine-3'-phosphate
  modified_base 5: mod_base = OTHER; note = 2'-O-methylcytidine-3'-phosphate
  modified_base 6: mod_base = OTHER; note = 2'-O-methyluridine-3'-phosphate
  modified_base 7: mod_base = OTHER; note = cytidine-2'-phosphate
  modified_base 8: mod_base = OTHER; note = 2'-O-methyladenosine-3'-phosphate
  modified_base 9: mod_base = OTHER; note = 2'-O-methylguanosine-3'-phosphate
  modified_base 10: mod_base = OTHER; note = 2'-O-methylcytidine-3'-phosphate
  modified_base 11: mod_base = OTHER; note = 2'-O-methylguanosine-3'-phosphate
  modified_base 12: mod_base = OTHER; note = 2'-O-methyladenosine-3'-phosphate
  modified_base 13: mod_base = OTHER; note = 2'-O-methylguanosine-3'-phosphate
  modified_base 14: mod_base = OTHER; note = 2'-deoxy-2'-fluorouridine-3'-phosphate
  modified_base 15: mod_base = OTHER; note = 2'-O-methyladenosine-3'-phosphate
  modified_base 16: mod_base = OTHER; note = 2'-deoxy-2'-fluorocytidine-3'-phosphate
  modified_base 17: mod_base = OTHER; note = 2'-O-methyluridine-3'-phosphate
  modified_base 18: mod_base = OTHER; note = 2'-O-methylguanosine-3'-phosphate
  modified_base 19: mod_base = OTHER; note = 2'-O-methyluridine-3'-phosphate
  modified_base 20: mod_base = OTHER; note = 2'-O-methylguanosine-3'-phosphate
  modified_base 21: mod_base = OTHER; note = 2'-O-methyladenosine-3'-phosphorothioate
  modified_base 22: mod_base = OTHER; note = 2'-O-methylguanosine-3'-phosphorothioate
  modified_base 23: mod_base = OTHER; note = 2'-O-methyladenosine
taccctcagcgagtactgtgaga

SEQ ID NO: 1032 - RNA, 23 nt, synthetic construct
  source 1..23: mol_type = other RNA
  modified_base 1: mod_base = OTHER; note = 2'-O-methyluridine-3'-phosphorothioate 5'-(E)-Vinylphosphonate
  modified_base 2: mod_base = OTHER; note = 2'-deoxy-2'-fluorouridine-3'-phosphorothioate
  modified_base 3: mod_base = OTHER; note = 2'-O-methyluridine-3'-phosphate
  modified_base 4: mod_base = OTHER; note = 2'-O-methyluridine-3'-phosphate
  modified_base 5: mod_base = OTHER; note = 2'-O-methyluridine-3'-phosphate
  modified_base 6: mod_base = OTHER; note = 2'-deoxy-2'-fluorocytidine-3'-phosphate
  modified_base 7: mod_base = OTHER; note = 2'-O-methyluridine-3'-phosphate
  modified_base 8: mod_base = OTHER; note = 2'-deoxy-2'-fluorouridine-3'-phosphate
  modified_base 9: mod_base = OTHER; note = 2'-deoxy-2'-fluoroguanosine-3'-phosphate
  modified_base 10: mod_base = OTHER; note = 2'-O-methyluridine-3'-phosphate
  modified_base 11: mod_base = OTHER; note = 2'-O-methyluridine-3'-phosphate
  modified_base 12: mod_base = OTHER; note = 2'-O-methylcytidine-3'-phosphate
  modified_base 13: mod_base = OTHER; note = 2'-O-methyladenosine-3'-phosphate
  modified_base 14: mod_base = OTHER; note = 2'-deoxy-2'-fluorocytidine-3'-phosphate
  modified_base 15: mod_base = OTHER; note = 2'-O-methylcytidine-3'-phosphate
  modified_base 16: mod_base = OTHER; note = 2'-deoxy-2'-fluorocytidine-3'-phosphate
  modified_base 17: mod_base = OTHER; note = 2'-O-methyluridine-3'-phosphate
  modified_base 18: mod_base = OTHER; note = 2'-O-methylcytidine-3'-phosphate
  modified_base 19: mod_base = OTHER; note = 2'-O-methyladenosine-3'-phosphate
  modified_base 20: mod_base = OTHER; note = 2'-O-methylguanosine-3'-phosphate
  modified_base 21: mod_base = OTHER; note = 2'-O-methylcytidine-3'-phosphorothioate
  modified_base 22: mod_base = OTHER; note = 2'-O-methylguanosine-3'-phosphorothioate
  modified_base 23: mod_base = OTHER; note = 2'-O-methyladenosine
tttttcttgttcaccctcagcga

SEQ ID NO: 1033 - RNA, 23 nt, synthetic construct
  source 1..23: mol_type = other RNA
  modified_base 1: mod_base = OTHER; note = 2'-O-methyluridine-3'-phosphorothioate 5'-(E)-Vinylphosphonate
  modified_base 2: mod_base = OTHER; note = 2'-deoxy-2'-fluorouridine-3'-phosphorothioate
  modified_base 3: mod_base = OTHER; note = 2'-O-methyluridine-3'-phosphate
  modified_base 4: mod_base = OTHER; note = 2'-O-methyladenosine-3'-phosphate
  modified_base 5: mod_base = OTHER; note = 2'-O-methyluridine-3'-phosphate
  modified_base 6: mod_base = OTHER; note = 2'-deoxy-2'-fluorocytidine-3'-phosphate
  modified_base 7: mod_base = OTHER; note = 2'-O-methyladenosine-3'-phosphate
  modified_base 8: mod_base = OTHER; note = 2'-deoxy-2'-fluoroguanosine-3'-phosphate
  modified_base 9: mod_base = OTHER; note = 2'-deoxy-2'-fluoroguanosine-3'-phosphate
  modified_base 10: mod_base = OTHER; note = 2'-O-methyluridine-3'-phosphate
  modified_base 11: mod_base = OTHER; note = 2'-O-methylcytidine-3'-phosphate
  modified_base 12: mod_base = OTHER; note = 2'-O-methyluridine-3'-phosphate
  modified_base 13: mod_base = OTHER; note = 2'-O-methyluridine-3'-phosphate
  modified_base 14: mod_base = OTHER; note = 2'-deoxy-2'-fluorouridine-3'-phosphate
  modified_base 15: mod_base = OTHER; note = 2'-O-methyluridine-3'-phosphate
  modified_base 16: mod_base = OTHER; note = 2'-deoxy-2'-fluorocytidine-3'-phosphate
  modified_base 17: mod_base = OTHER; note = 2'-O-methyluridine-3'-phosphate
  modified_base 18: mod_base = OTHER; note = 2'-O-methyluridine-3'-phosphate
  modified_base 19: mod_base = OTHER; note = 2'-O-methylguanosine-3'-phosphate
  modified_base 20: mod_base = OTHER; note = 2'-O-methyluridine-3'-phosphate
  modified_base 21: mod_base = OTHER; note = 2'-O-methyluridine-3'-phosphorothioate
  modified_base 22: mod_base = OTHER; note = 2'-O-methylcytidine-3'-phosphorothioate
  modified_base 23: mod_base = OTHER; note = 2'-O-methyladenosine
tttatcaggtcttttcttgttca

SEQ ID NO: 1034 - RNA, 23 nt, synthetic construct
  source 1..23: mol_type = other RNA
  modified_base 1: mod_base = OTHER; note = 2'-O-methyluridine-3'-phosphorothioate 5'-(E)-Vinylphosphonate
  modified_base 2: mod_base = OTHER; note = 2'-deoxy-2'-fluorouridine-3'-phosphorothioate
  modified_base 3: mod_base = OTHER; note = 2'-O-methylcytidine-3'-phosphate
  modified_base 4: mod_base = OTHER; note = 2'-O-methyluridine-3'-phosphate
  modified_base 5: mod_base = OTHER; note = 2'-O-methyluridine-3'-phosphate
  modified_base 6: mod_base = OTHER; note = 2'-deoxy-2'-fluorouridine-3'-phosphate
  modified_base 7: mod_base = OTHER; note = 2'-O-methyladenosine-3'-phosphate
  modified_base 8: mod_base = OTHER; note = 2'-deoxy-2'-fluorouridine-3'-phosphate
  modified_base 9: mod_base = OTHER; note = 2'-deoxy-2'-fluorocytidine-3'-phosphate
  modified_base 10: mod_base = OTHER; note = 2'-O-methyladenosine-3'-phosphate
  modified_base 11: mod_base = OTHER; note = 2'-O-methylguanosine-3'-phosphate
  modified_base 12: mod_base = OTHER; note = 2'-O-methylguanosine-3'-phosphate
  modified_base 13: mod_base = OTHER; note = 2'-O-methyluridine-3'-phosphate
  modified_base 14: mod_base = OTHER; note = 2'-deoxy-2'-fluorocytidine-3'-phosphate
  modified_base 15: mod_base = OTHER; note = 2'-O-methyluridine-3'-phosphate
  modified_base 16: mod_base = OTHER; note = 2'-deoxy-2'-fluorouridine-3'-phosphate
  modified_base 17: mod_base = OTHER; note = 2'-O-methyluridine-3'-phosphate
  modified_base 18: mod_base = OTHER; note = 2'-O-methyluridine-3'-phosphate
  modified_base 19: mod_base = OTHER; note = 2'-O-methylcytidine-3'-phosphate
  modified_base 20: mod_base = OTHER; note = 2'-O-methyluridine-3'-phosphate
  modified_base 21: mod_base = OTHER; note = 2'-O-methyluridine-3'-phosphorothioate
  modified_base 22: mod_base = OTHER; note = 2'-O-methylguanosine-3'-phosphorothioate
  modified_base 23: mod_base = OTHER; note = 2'-O-methyluridine
ttctttatcaggtcttttcttgt

SEQ ID NO: 1035 - RNA, 23 nt, synthetic construct
  source 1..23: mol_type = other RNA
  modified_base 1: mod_base = OTHER; note = 2'-O-methyluridine-3'-phosphorothioate 5'-(E)-Vinylphosphonate
  modified_base 2: mod_base = OTHER; note = 2'-deoxy-2'-fluoroadenosine-3'-phosphorothioate
  modified_base 3: mod_base = OTHER; note = 2'-O-methyluridine-3'-phosphate
  modified_base 4: mod_base = OTHER; note = 2'-O-methylcytidine-3'-phosphate
  modified_base 5: mod_base = OTHER; note = 2'-O-methyluridine-3'-phosphate
  modified_base 6: mod_base = OTHER; note = 2'-deoxy-2'-fluorouridine-3'-phosphate
  modified_base 7: mod_base = OTHER; note = 2'-O-methyluridine-3'-phosphate
  modified_base 8: mod_base = OTHER; note = 2'-deoxy-2'-fluoroadenosine-3'-phosphate
  modified_base 9: mod_base = OTHER; note = 2'-deoxy-2'-fluorouridine-3'-phosphate
  modified_base 10: mod_base = OTHER; note = 2'-O-methylcytidine-3'-phosphate
  modified_base 11: mod_base = OTHER; note = 2'-O-methyladenosine-3'-phosphate
  modified_base 12: mod_base = OTHER; note = 2'-O-methylguanosine-3'-phosphate
  modified_base 13: mod_base = OTHER; note = 2'-O-methylguanosine-3'-phosphate
  modified_base 14: mod_base = OTHER; note = 2'-deoxy-2'-fluorouridine-3'-phosphate
  modified_base 15: mod_base = OTHER; note = 2'-O-methylcytidine-3'-phosphate
  modified_base 16: mod_base = OTHER; note = 2'-deoxy-2'-fluorouridine-3'-phosphate
  modified_base 17: mod_base = OTHER; note = 2'-O-methyluridine-3'-phosphate
  modified_base 18: mod_base = OTHER; note = 2'-O-methyluridine-3'-phosphate
  modified_base 19: mod_base = OTHER; note = 2'-O-methyluridine-3'-phosphate
  modified_base 20: mod_base = OTHER; note = 2'-O-methylcytidine-3'-phosphate
  modified_base 21: mod_base = OTHER; note = 2'-O-methyluridine-3'-phosphorothioate
  modified_base 22: mod_base = OTHER; note = 2'-O-methyluridine-3'-phosphorothioate
  modified_base 23: mod_base = OTHER; note = 2'-O-methylguanosine
tatctttatcaggtcttttcttg

SEQ ID NO: 1036 - RNA, 23 nt, synthetic construct
  source 1..23: mol_type = other RNA
  modified_base 1: mod_base = OTHER; note = 2'-O-methyluridine-3'-phosphorothioate 5'-(E)-Vinylphosphonate
  modified_base 2: mod_base = OTHER; note = 2'-deoxy-2'-fluoroadenosine-3'-phosphorothioate
  modified_base 3: mod_base = OTHER; note = 2'-O-methyladenosine-3'-phosphate
  modified_base 4: mod_base = OTHER; note = 2'-O-methyluridine-3'-phosphate
  modified_base 5: mod_base = OTHER; note = 2'-O-methylcytidine-3'-phosphate
  modified_base 6: mod_base = OTHER; note = 2'-deoxy-2'-fluorouridine-3'-phosphate
  modified_base 7: mod_base = OTHER; note = 2'-O-methyluridine-3'-phosphate
  modified_base 8: mod_base = OTHER; note = 2'-deoxy-2'-fluorouridine-3'-phosphate
  modified_base 9: mod_base = OTHER; note = 2'-deoxy-2'-fluoroadenosine-3'-phosphate
  modified_base 10: mod_base = OTHER; note = 2'-O-methyluridine-3'-phosphate
  modified_base 11: mod_base = OTHER; note = 2'-O-methylcytidine-3'-phosphate
  modified_base 12: mod_base = OTHER; note = 2'-O-methyladenosine-3'-phosphate
  modified_base 13: mod_base = OTHER; note = 2'-O-methylguanosine-3'-phosphate
  modified_base 14: mod_base = OTHER; note = 2'-deoxy-2'-fluoroguanosine-3'-phosphate
  modified_base 15: mod_base = OTHER; note = 2'-O-methyluridine-3'-phosphate
  modified_base 16: mod_base = OTHER; note = 2'-deoxy-2'-fluorocytidine-3'-phosphate
  modified_base 17: mod_base = OTHER; note = 2'-O-methyluridine-3'-phosphate
  modified_base 18: mod_base = OTHER; note = 2'-O-methyluridine-3'-phosphate
  modified_base 19: mod_base = OTHER; note = 2'-O-methyluridine-3'-phosphate
  modified_base 20: mod_base = OTHER; note = 2'-O-methyluridine-3'-phosphate
  modified_base 21: mod_base = OTHER; note = 2'-O-methylcytidine-3'-phosphorothioate
  modified_base 22: mod_base = OTHER; note = 2'-O-methyluridine-3'-phosphorothioate
  modified_base 23: mod_base = OTHER; note = 2'-O-methyluridine
taatctttatcaggtcttttctt

SEQ ID NO: 1037 - RNA, 23 nt, synthetic construct
  source 1..23: mol_type = other RNA
  modified_base 1: mod_base = OTHER; note = 2'-O-methyluridine-3'-phosphorothioate 5'-(E)-Vinylphosphonate
  modified_base 2: mod_base = OTHER; note = 2'-deoxy-2'-fluorouridine-3'-phosphorothioate
  modified_base 3: mod_base = OTHER; note = 2'-O-methyladenosine-3'-phosphate
  modified_base 4: mod_base = OTHER; note = 2'-O-methyladenosine-3'-phosphate
  modified_base 5: mod_base = OTHER; note = 2'-O-methyluridine-3'-phosphate
  modified_base 6: mod_base = OTHER; note = 2'-deoxy-2'-fluorocytidine-3'-phosphate
  modified_base 7: mod_base = OTHER; note = 2'-O-methyluridine-3'-phosphate
  modified_base 8: mod_base = OTHER; note = 2'-deoxy-2'-fluorouridine-3'-phosphate
  modified_base 9: mod_base = OTHER; note = 2'-deoxy-2'-fluorouridine-3'-phosphate
  modified_base 10: mod_base = OTHER; note = 2'-O-methyladenosine-3'-phosphate
  modified_base 11: mod_base = OTHER; note = 2'-O-methyluridine-3'-phosphate
  modified_base 12: mod_base = OTHER; note = 2'-O-methylcytidine-3'-phosphate
  modified_base 13: mod_base = OTHER; note = 2'-O-methyladenosine-3'-phosphate
  modified_base 14: mod_base = OTHER; note = 2'-deoxy-2'-fluoroguanosine-3'-phosphate
  modified_base 15: mod_base = OTHER; note = 2'-O-methylguanosine-3'-phosphate
  modified_base 16: mod_base = OTHER; note = 2'-deoxy-2'-fluorouridine-3'-phosphate
  modified_base 17: mod_base = OTHER; note = 2'-O-methylcytidine-3'-phosphate
  modified_base 18: mod_base = OTHER; note = 2'-O-methyluridine-3'-phosphate
  modified_base 19: mod_base = OTHER; note = 2'-O-methyluridine-3'-phosphate
  modified_base 20: mod_base = OTHER; note = 2'-O-methyluridine-3'-phosphate
  modified_base 21: mod_base = OTHER; note = 2'-O-methyluridine-3'-phosphorothioate
  modified_base 22: mod_base = OTHER; note = 2'-O-methylcytidine-3'-phosphorothioate
  modified_base 23: mod_base = OTHER; note = 2'-O-methyluridine
ttaatctttatcaggtcttttct

SEQ ID NO: 1038 - RNA, 23 nt, synthetic construct
  source 1..23: mol_type = other RNA
  modified_base 1: mod_base = OTHER; note = 2'-O-methyluridine-3'-phosphorothioate 5'-(E)-Vinylphosphonate
  modified_base 2: mod_base = OTHER; note = 2'-deoxy-2'-fluorouridine-3'-phosphorothioate
  modified_base 3: mod_base = OTHER; note = 2'-O-methyluridine-3'-phosphate
  modified_base 4: mod_base = OTHER; note = 2'-O-methyladenosine-3'-phosphate
  modified_base 5: mod_base = OTHER; note = 2'-O-methyladenosine-3'-phosphate
  modified_base 6: mod_base = OTHER; note = 2'-deoxy-2'-fluorouridine-3'-phosphate
  modified_base 7: mod_base = OTHER; note = 2'-O-methylcytidine-3'-phosphate
  modified_base 8: mod_base = OTHER; note = 2'-deoxy-2'-fluorouridine-3'-phosphate
  modified_base 9: mod_base = OTHER; note = 2'-deoxy-2'-fluorouridine-3'-phosphate
  modified_base 10: mod_base = OTHER; note = 2'-O-methyluridine-3'-phosphate
  modified_base 11: mod_base = OTHER; note = 2'-O-methyladenosine-3'-phosphate
  modified_base 12: mod_base = OTHER; note = 2'-O-methyluridine-3'-phosphate
  modified_base 13: mod_base = OTHER; note = 2'-O-methylcytidine-3'-phosphate
  modified_base 14: mod_base = OTHER; note = 2'-deoxy-2'-fluoroadenosine-3'-phosphate
  modified_base 15: mod_base = OTHER; note = 2'-O-methylguanosine-3'-phosphate
  modified_base 16: mod_base = OTHER; note = 2'-deoxy-2'-fluoroguanosine-3'-phosphate
  modified_base 17: mod_base = OTHER; note = 2'-O-methyluridine-3'-phosphate
  modified_base 18: mod_base = OTHER; note = 2'-O-methylcytidine-3'-phosphate
  modified_base 19: mod_base = OTHER; note = 2'-O-methyluridine-3'-phosphate
  modified_base 20: mod_base = OTHER; note = 2'-O-methyluridine-3'-phosphate
  modified_base 21: mod_base = OTHER; note = 2'-O-methyluridine-3'-phosphorothioate
  modified_base 22: mod_base = OTHER; note = 2'-O-methyluridine-3'-phosphorothioate
  modified_base 23: mod_base = OTHER; note = 2'-O-methylcytidine
tttaatctttatcaggtcttttc

SEQ ID NO: 1039 - RNA, 23 nt, synthetic construct
  source 1..23: mol_type = other RNA
  modified_base 1: mod_base = OTHER; note = 2'-O-methyluridine-3'-phosphorothioate 5'-(E)-Vinylphosphonate
  modified_base 2: mod_base = OTHER; note = 2'-deoxy-2'-fluoroguanosine-3'-phosphorothioate
  modified_base 3: mod_base = OTHER; note = 2'-O-methyluridine-3'-phosphate
  modified_base 4: mod_base = OTHER; note = 2'-O-methyluridine-3'-phosphate
  modified_base 5: mod_base = OTHER; note = 2'-O-methyladenosine-3'-phosphate
  modified_base 6: mod_base = OTHER; note = 2'-deoxy-2'-fluoroadenosine-3'-phosphate
  modified_base 7: mod_base = OTHER; note = 2'-O-methyluridine-3'-phosphate
  modified_base 8: mod_base = OTHER; note = 2'-deoxy-2'-fluorocytidine-3'-phosphate
  modified_base 9: mod_base = OTHER; note = 2'-deoxy-2'-fluorouridine-3'-phosphate
  modified_base 10: mod_base = OTHER; note = 2'-O-methyluridine-3'-phosphate
  modified_base 11: mod_base = OTHER; note = 2'-O-methyluridine-3'-phosphate
  modified_base 12: mod_base = OTHER; note = 2'-O-methyladenosine-3'-phosphate
  modified_base 13: mod_base = OTHER; note = 2'-O-methyluridine-3'-phosphate
  modified_base 14: mod_base = OTHER; note = 2'-deoxy-2'-fluorocytidine-3'-phosphate
  modified_base 15: mod_base = OTHER; note = 2'-O-methyladenosine-3'-phosphate
  modified_base 16: mod_base = OTHER; note = 2'-deoxy-2'-fluoroguanosine-3'-phosphate
  modified_base 17: mod_base = OTHER; note = 2'-O-methylguanosine-3'-phosphate
  modified_base 18: mod_base = OTHER; note = 2'-O-methyluridine-3'-phosphate
  modified_base 19: mod_base = OTHER; note = 2'-O-methylcytidine-3'-phosphate
  modified_base 20: mod_base = OTHER; note = 2'-O-methyluridine-3'-phosphate
  modified_base 21: mod_base = OTHER; note = 2'-O-methyluridine-3'-phosphorothioate
  modified_base 22: mod_base = OTHER; note = 2'-O-methyluridine-3'-phosphorothioate
  modified_base 23: mod_base = OTHER; note = 2'-O-methyluridine
tgttaatctttatcaggtctttt

SEQ ID NO: 1040 - RNA, 23 nt, synthetic construct
  source 1..23: mol_type = other RNA
  modified_base 1: mod_base = OTHER; note = 2'-O-methyluridine-3'-phosphorothioate 5'-(E)-Vinylphosphonate
  modified_base 2: mod_base = OTHER; note = 2'-deoxy-2'-fluorouridine-3'-phosphorothioate
  modified_base 3: mod_base = OTHER; note = 2'-O-methylguanosine-3'-phosphate
  modified_base 4: mod_base = OTHER; note = 2'-O-methylguanosine-3'-phosphate
  modified_base 5: mod_base = OTHER; note = 2'-O-methyluridine-3'-phosphate
  modified_base 6: mod_base = OTHER; note = 2'-deoxy-2'-fluorouridine-3'-phosphate
  modified_base 7: mod_base = OTHER; note = 2'-O-methyladenosine-3'-phosphate
  modified_base 8: mod_base = OTHER; note = 2'-deoxy-2'-fluoroadenosine-3'-phosphate
  modified_base 9: mod_base = OTHER; note = 2'-deoxy-2'-fluorouridine-3'-phosphate
  modified_base 10: mod_base = OTHER; note = 2'-O-methylcytidine-3'-phosphate
  modified_base 11: mod_base = OTHER; note = 2'-O-methyluridine-3'-phosphate
  modified_base 12: mod_base = OTHER; note = 2'-O-methyluridine-3'-phosphate
  modified_base 13: mod_base = OTHER; note = 2'-O-methyluridine-3'-phosphate
  modified_base 14: mod_base = OTHER; note = 2'-deoxy-2'-fluoroadenosine-3'-phosphate
  modified_base 15: mod_base = OTHER; note = 2'-O-methyluridine-3'-phosphate
  modified_base 16: mod_base = OTHER; note = 2'-deoxy-2'-fluorocytidine-3'-phosphate
  modified_base 17: mod_base = OTHER; note = 2'-O-methyladenosine-3'-phosphate
  modified_base 18: mod_base = OTHER; note = 2'-O-methylguanosine-3'-phosphate
  modified_base 19: mod_base = OTHER; note = 2'-O-methylguanosine-3'-phosphate
  modified_base 20: mod_base = OTHER; note = 2'-O-methyluridine-3'-phosphate
  modified_base 21: mod_base = OTHER; note = 2'-O-methylcytidine-3'-phosphorothioate
  modified_base 22: mod_base = OTHER; note = 2'-O-methyluridine-3'-phosphorothioate
  modified_base 23: mod_base = OTHER; note = 2'-O-methyluridine
ttggttaatctttatcaggtctt

SEQ ID NO: 1041 - RNA, 23 nt, synthetic construct
  source 1..23: mol_type = other RNA
  modified_base 1: mod_base = OTHER; note = 2'-O-methyluridine-3'-phosphorothioate 5'-(E)-Vinylphosphonate
  modified_base 2: mod_base = OTHER; note = 2'-deoxy-2'-fluorocytidine-3'-phosphorothioate
  modified_base 3: mod_base = OTHER; note = 2'-O-methyluridine-3'-phosphate
  modified_base 4: mod_base = OTHER; note = 2'-O-methylguanosine-3'-phosphate
  modified_base 5: mod_base = OTHER; note = 2'-O-methylguanosine-3'-phosphate
  modified_base 6: mod_base = OTHER; note = 2'-deoxy-2'-fluorouridine-3'-phosphate
  modified_base 7: mod_base = OTHER; note = 2'-O-methyluridine-3'-phosphate
  modified_base 8: mod_base = OTHER; note = 2'-deoxy-2'-fluoroadenosine-3'-phosphate
  modified_base 9: mod_base = OTHER; note = 2'-deoxy-2'-fluoroadenosine-3'-phosphate
  modified_base 10: mod_base = OTHER; note = 2'-O-methyluridine-3'-phosphate
  modified_base 11: mod_base = OTHER; note = 2'-O-methylcytidine-3'-phosphate
  modified_base 12: mod_base = OTHER; note = 2'-O-methyluridine-3'-phosphate
  modified_base 13: mod_base = OTHER; note = 2'-O-methyluridine-3'-phosphate
  modified_base 14: mod_base = OTHER; note = 2'-deoxy-2'-fluorouridine-3'-phosphate
  modified_base 15: mod_base = OTHER; note = 2'-O-methyladenosine-3'-phosphate
  modified_base 16: mod_base = OTHER; note = 2'-deoxy-2'-fluorouridine-3'-phosphate
  modified_base 17: mod_base = OTHER; note = 2'-O-methylcytidine-3'-phosphate
  modified_base 18: mod_base = OTHER; note = 2'-O-methyladenosine-3'-phosphate
  modified_base 19: mod_base = OTHER; note = 2'-O-methylguanosine-3'-phosphate
  modified_base 20: mod_base = OTHER; note = 2'-O-methylguanosine-3'-phosphate
  modified_base 21: mod_base = OTHER; note = 2'-O-methyluridine-3'-phosphorothioate
  modified_base 22: mod_base = OTHER; note = 2'-O-methylcytidine-3'-phosphorothioate
  modified_base 23: mod_base = OTHER; note = 2'-O-methyluridine
tctggttaatctttatcaggtct

SEQ ID NO: 1042 - RNA, 23 nt, synthetic construct
  source 1..23: mol_type = other RNA
  modified_base 1: mod_base = OTHER; note = 2'-O-methyluridine-3'-phosphorothioate 5'-(E)-Vinylphosphonate
  modified_base 2: mod_base = OTHER; note = 2'-deoxy-2'-fluorouridine-3'-phosphorothioate
  modified_base 3: mod_base = OTHER; note = 2'-O-methyluridine-3'-phosphate
  modified_base 4: mod_base = OTHER; note = 2'-O-methyluridine-3'-phosphate
  modified_base 5: mod_base = OTHER; note = 2'-O-methyluridine-3'-phosphate
  modified_base 6: mod_base = OTHER; note = 2'-deoxy-2'-fluorocytidine-3'-phosphate
  modified_base 7: mod_base = OTHER; note = 2'-O-methyluridine-3'-phosphate
  modified_base 8: mod_base = OTHER; note = 2'-deoxy-2'-fluorouridine-3'-phosphate
  modified_base 9: mod_base = OTHER; note = 2'-deoxy-2'-fluorocytidine-3'-phosphate
  modified_base 10: mod_base = OTHER; note = 2'-O-methyluridine-3'-phosphate
  modified_base 11: mod_base = OTHER; note = 2'-O-methylguanosine-3'-phosphate
  modified_base 12: mod_base = OTHER; note = 2'-O-methylguanosine-3'-phosphate
  modified_base 13: mod_base = OTHER; note = 2'-O-methyluridine-3'-phosphate
  modified_base 14: mod_base = OTHER; note = 2'-deoxy-2'-fluorouridine-3'-phosphate
  modified_base 15: mod_base = OTHER; note = 2'-O-methyladenosine-3'-phosphate
  modified_base 16: mod_base = OTHER; note = 2'-deoxy-2'-fluoroadenosine-3'-phosphate
  modified_base 17: mod_base = OTHER; note = 2'-O-methyluridine-3'-phosphate
  modified_base 18: mod_base = OTHER; note = 2'-O-methylcytidine-3'-phosphate
  modified_base 19: mod_base = OTHER; note = 2'-O-methyluridine-3'-phosphate
  modified_base 20: mod_base = OTHER; note = 2'-O-methyluridine-3'-phosphate
  modified_base 21: mod_base = OTHER; note = 2'-O-methyluridine-3'-phosphorothioate
  modified_base 22: mod_base = OTHER; note = 2'-O-methyladenosine-3'-phosphorothioate
  modified_base 23: mod_base = OTHER; note = 2'-O-methyluridine
tttttcttctggttaatctttat

SEQ ID NO: 1043 - RNA, 23 nt, synthetic construct
  source 1..23: mol_type = other RNA
  modified_base 1: mod_base = OTHER; note = 2'-O-methyluridine-3'-phosphorothioate 5'-(E)-Vinylphosphonate
  modified_base 2: mod_base = OTHER; note = 2'-deoxy-2'-fluorocytidine-3'-phosphorothioate
  modified_base 3: mod_base = OTHER; note = 2'-O-methyluridine-3'-phosphate
  modified_base 4: mod_base = OTHER; note = 2'-O-methyluridine-3'-phosphate
  modified_base 5: mod_base = OTHER; note = 2'-O-methylguanosine-3'-phosphate
  modified_base 6: mod_base = OTHER; note = 2'-deoxy-2'-fluorouridine-3'-phosphate
  modified_base 7: mod_base = OTHER; note = 2'-O-methyluridine-3'-phosphate
  modified_base 8: mod_base = OTHER; note = 2'-deoxy-2'-fluorouridine-3'-phosphate
  modified_base 9: mod_base = OTHER; note = 2'-deoxy-2'-fluorouridine-3'-phosphate
  modified_base 10: mod_base = OTHER; note = 2'-O-methylcytidine-3'-phosphate
  modified_base 11: mod_base = OTHER; note = 2'-O-methyluridine-3'-phosphate
  modified_base 12: mod_base = OTHER; note = 2'-O-methyluridine-3'-phosphate
  modified_base 13: mod_base = OTHER; note = 2'-O-methylcytidine-3'-phosphate
  modified_base 14: mod_base = OTHER; note = 2'-deoxy-2'-fluorouridine-3'-phosphate
  modified_base 15: mod_base = OTHER; note = 2'-O-methylguanosine-3'-phosphate
  modified_base 16: mod_base = OTHER; note = 2'-deoxy-2'-fluoroguanosine-3'-phosphate
  modified_base 17: mod_base = OTHER; note = 2'-O-methyluridine-3'-phosphate
  modified_base 18: mod_base = OTHER; note = 2'-O-methyluridine-3'-phosphate
  modified_base 19: mod_base = OTHER; note = 2'-O-methyladenosine-3'-phosphate
  modified_base 20: mod_base = OTHER; note = 2'-O-methyladenosine-3'-phosphate
  modified_base 21: mod_base = OTHER; note = 2'-O-methyluridine-3'-phosphorothioate
  modified_base 22: mod_base = OTHER; note = 2'-O-methylcytidine-3'-phosphorothioate
  modified_base 23: mod_base = OTHER; note = 2'-O-methyluridine
tcttgttttcttctggttaatct

SEQ ID NO: 1044 - RNA, 23 nt, synthetic construct
  source 1..23: mol_type = other RNA
  modified_base 1: mod_base = OTHER; note = 2'-O-methyluridine-3'-phosphorothioate 5'-(E)-Vinylphosphonate
  modified_base 2: mod_base = OTHER; note = 2'-deoxy-2'-fluorocytidine-3'-phosphorothioate
  modified_base 3: mod_base = OTHER; note = 2'-O-methyluridine-3'-phosphate
  modified_base 4: mod_base = OTHER; note = 2'-O-methylcytidine-3'-phosphate
  modified_base 5: mod_base = OTHER; note = 2'-O-methylcytidine-3'-phosphate
  modified_base 6: mod_base = OTHER; note = 2'-deoxy-2'-fluorouridine-3'-phosphate
  modified_base 7: mod_base = OTHER; note = 2'-O-methyluridine-3'-phosphate
  modified_base 8: mod_base = OTHER; note = 2'-deoxy-2'-fluoroguanosine-3'-phosphate
  modified_base 9: mod_base = OTHER; note = 2'-deoxy-2'-fluorouridine-3'-phosphate
  modified_base 10: mod_base = OTHER; note = 2'-O-methyluridine-3'-phosphate
  modified_base 11: mod_base = OTHER; note = 2'-O-methyluridine-3'-phosphate
  modified_base 12: mod_base = OTHER; note = 2'-O-methyluridine-3'-phosphate
  modified_base 13: mod_base = OTHER; note = 2'-O-methylcytidine-3'-phosphate
  modified_base 14: mod_base = OTHER; note = 2'-deoxy-2'-fluorouridine-3'-phosphate
  modified_base 15: mod_base = OTHER; note = 2'-O-methyluridine-3'-phosphate
  modified_base 16: mod_base = OTHER; note = 2'-deoxy-2'-fluorocytidine-3'-phosphate
  modified_base 17: mod_base = OTHER; note = 2'-O-methyluridine-3'-phosphate
  modified_base 18: mod_base = OTHER; note = 2'-O-methylguanosine-3'-phosphate
  modified_base 19: mod_base = OTHER; note = 2'-O-methylguanosine-3'-phosphate
  modified_base 20: mod_base = OTHER; note = 2'-O-methyluridine-3'-phosphate
  modified_base 21: mod_base = OTHER; note = 2'-O-methyluridine-3'-phosphorothioate
  modified_base 22: mod_base = OTHER; note = 2'-O-methyladenosine-3'-phosphorothioate
  modified_base 23: mod_base = OTHER; note = 2'-O-methyladenosine
tctccttgttttcttctggttaa

SEQ ID NO: 1045 - RNA, 23 nt, synthetic construct
  source 1..23: mol_type = other RNA
  modified_base 1: mod_base = OTHER; note = 2'-O-methyluridine-3'-phosphorothioate 5'-(E)-Vinylphosphonate
  modified_base 2: mod_base = OTHER; note = 2'-deoxy-2'-fluoroguanosine-3'-phosphorothioate
  modified_base 3: mod_base = OTHER; note = 2'-O-methylguanosine-3'-phosphate
  modified_base 4: mod_base = OTHER; note = 2'-O-methylcytidine-3'-phosphate
  modified_base 5: mod_base = OTHER; note = 2'-O-methyluridine-3'-phosphate
  modified_base 6: mod_base = OTHER; note = 2'-O-methylguanosine-3'-phosphate
  modified_base 7: mod_base = OTHER; note = cytidine-2'-phosphate
  modified_base 8: mod_base = OTHER; note = 2'-O-methylguanosine-3'-phosphate
  modified_base 9: mod_base = OTHER; note = 2'-O-methylguanosine-3'-phosphate
  modified_base 10: mod_base = OTHER; note = 2'-O-methyluridine-3'-phosphate
  modified_base 11: mod_base = OTHER; note = 2'-O-methyluridine-3'-phosphate
  modified_base 12: mod_base = OTHER; note = 2'-O-methylguanosine-3'-phosphate
  modified_base 13: mod_base = OTHER; note = 2'-O-methyluridine-3'-phosphate
  modified_base 14: mod_base = OTHER; note = 2'-deoxy-2'-fluorouridine-3'-phosphate
  modified_base 15: mod_base = OTHER; note = 2'-O-methyluridine-3'-phosphate
  modified_base 16: mod_base = OTHER; note = 2'-deoxy-2'-fluorocytidine-3'-phosphate
  modified_base 17: mod_base = OTHER; note = 2'-O-methylcytidine-3'-phosphate
  modified_base 18: mod_base = OTHER; note = 2'-O-methylcytidine-3'-phosphate
  modified_base 19: mod_base = OTHER; note = 2'-O-methyluridine-3'-phosphate
  modified_base 20: mod_base = OTHER; note = 2'-O-methylcytidine-3'-phosphate
  modified_base 21: mod_base = OTHER; note = 2'-O-methylcytidine-3'-phosphorothioate
  modified_base 22: mod_base = OTHER; note = 2'-O-methyluridine-3'-phosphorothioate
  modified_base 23: mod_base = OTHER; note = 2'-O-methyluridine
tggctgcggttgtttccctcctt

SEQ ID NO: 1046 - RNA, 23 nt, synthetic construct
  source 1..23: mol_type = other RNA
  modified_base 1: mod_base = OTHER; note = 2'-O-methyluridine-3'-phosphorothioate 5'-(E)-Vinylphosphonate
  modified_base 2: mod_base = OTHER; note = 2'-deoxy-2'-fluoroadenosine-3'-phosphorothioate
  modified_base 3: mod_base = OTHER; note = 2'-O-methylguanosine-3'-phosphate
  modified_base 4: mod_base = OTHER; note = 2'-O-methylguanosine-3'-phosphate
  modified_base 5: mod_base = OTHER; note = 2'-O-methylcytidine-3'-phosphate
  modified_base 6: mod_base = OTHER; note = 2'-O-methyluridine-3'-phosphate
  modified_base 7: mod_base = OTHER; note = guanosine-2'-phosphate
  modified_base 8: mod_base = OTHER; note = 2'-O-methylcytidine-3'-phosphate
  modified_base 9: mod_base = OTHER; note = 2'-O-methylguanosine-3'-phosphate
  modified_base 10: mod_base = OTHER; note = 2'-O-methylguanosine-3'-phosphate
  modified_base 11: mod_base = OTHER; note = 2'-O-methyluridine-3'-phosphate
  modified_base 12: mod_base = OTHER; note = 2'-O-methyluridine-3'-phosphate
  modified_base 13: mod_base = OTHER; note = 2'-O-methylguanosine-3'-phosphate
  modified_base 14: mod_base = OTHER; note = 2'-deoxy-2'-fluorouridine-3'-phosphate
  modified_base 15: mod_base = OTHER; note = 2'-O-methyluridine-3'-phosphate
  modified_base 16: mod_base = OTHER; note = 2'-deoxy-2'-fluorouridine-3'-phosphate
  modified_base 17: mod_base = OTHER; note = 2'-O-methylcytidine-3'-phosphate
  modified_base 18: mod_base = OTHER; note = 2'-O-methylcytidine-3'-phosphate
  modified_base 19: mod_base = OTHER; note = 2'-O-methylcytidine-3'-phosphate
  modified_base 20: mod_base = OTHER; note = 2'-O-methyluridine-3'-phosphate
  modified_base 21: mod_base = OTHER; note = 2'-O-methylcytidine-3'-phosphorothioate
  modified_base 22: mod_base = OTHER; note = 2'-O-methylcytidine-3'-phosphorothioate
  modified_base 23: mod_base = OTHER; note = 2'-O-methyluridine
taggctgcggttgtttccctcct

SEQ ID NO: 1047 - RNA, 23 nt, synthetic construct
  source 1..23: mol_type = other RNA
  modified_base 1: mod_base = OTHER; note = 2'-O-methyluridine-3'-phosphorothioate 5'-(E)-Vinylphosphonate
  modified_base 2: mod_base = OTHER; note = 2'-deoxy-2'-fluorocytidine-3'-phosphorothioate
  modified_base 3: mod_base = OTHER; note = 2'-O-methylcytidine-3'-phosphate
  modified_base 4: mod_base = OTHER; note = 2'-O-methyladenosine-3'-phosphate
  modified_base 5: mod_base = OTHER; note = 2'-O-methylguanosine-3'-phosphate
  modified_base 6: mod_base = OTHER; note = 2'-O-methyladenosine-3'-phosphate
  modified_base 7: mod_base = OTHER; note = guanosine-2'-phosphate
  modified_base 8: mod_base = OTHER; note = 2'-O-methylcytidine-3'-phosphate
  modified_base 9: mod_base = OTHER; note = 2'-O-methyluridine-3'-phosphate
  modified_base 10: mod_base = OTHER; note = 2'-O-methyluridine-3'-phosphate
  modified_base 11: mod_base = OTHER; note = 2'-O-methylguanosine-3'-phosphate
  modified_base 12: mod_base = OTHER; note = 2'-O-methylcytidine-3'-phosphate
  modified_base 13: mod_base = OTHER; note = 2'-O-methyluridine-3'-phosphate
  modified_base 14: mod_base = OTHER; note = 2'-deoxy-2'-fluoroadenosine-3'-phosphate
  modified_base 15: mod_base = OTHER; note = 2'-O-methylcytidine-3'-phosphate
  modified_base 16: mod_base = OTHER; note = 2'-deoxy-2'-fluoroadenosine-3'-phosphate
  modified_base 17: mod_base = OTHER; note = 2'-O-methylguanosine-3'-phosphate
  modified_base 18: mod_base = OTHER; note = 2'-O-methylguanosine-3'-phosphate
  modified_base 19: mod_base = OTHER; note = 2'-O-methylcytidine-3'-phosphate
  modified_base 20: mod_base = OTHER; note = 2'-O-methyluridine-3'-phosphate
  modified_base 21: mod_base = OTHER; note = 2'-O-methylguanosine-3'-phosphorothioate
  modified_base 22: mod_base = OTHER; note = 2'-O-methylcytidine-3'-phosphorothioate
  modified_base 23: mod_base = OTHER; note = 2'-O-methylguanosine
tccagagcttgctacaggctgcg

SEQ ID NO: 1048 - RNA, 23 nt, synthetic construct
  source 1..23: mol_type = other RNA
  modified_base 1: mod_base = OTHER; note = 2'-O-methyluridine-3'-phosphorothioate 5'-(E)-Vinylphosphonate
  modified_base 2: mod_base = OTHER; note = 2'-deoxy-2'-fluoroguanosine-3'-phosphorothioate
  modified_base 3: mod_base = OTHER; note = 2'-O-methylcytidine-3'-phosphate
  modified_base 4: mod_base = OTHER; note = 2'-O-methylguanosine-3'-phosphate
  modified_base 5: mod_base = OTHER; note = 2'-O-methyladenosine-3'-phosphate
  modified_base 6: mod_base = OTHER; note = 2'-O-methylcytidine-3'-phosphate
  modified_base 7: mod_base = OTHER; note = Thymidine-glycol nucleic acid (GNA), S-Isomer
  modified_base 8: mod_base = OTHER; note = 2'-O-methylcytidine-3'-phosphate
  modified_base 9: mod_base = OTHER; note = 2'-O-methylcytidine-3'-phosphate
  modified_base 10: mod_base = OTHER; note = 2'-O-methyluridine-3'-phosphate
  modified_base 11: mod_base = OTHER; note = 2'-O-methylguanosine-3'-phosphate
  modified_base 12: mod_base = OTHER; note = 2'-O-methyladenosine-3'-phosphate
  modified_base 13: mod_base = OTHER; note = 2'-O-methylguanosine-3'-phosphate
  modified_base 14: mod_base = OTHER; note = 2'-deoxy-2'-fluorouridine-3'-phosphate
  modified_base 15: mod_base = OTHER; note = 2'-O-methyluridine-3'-phosphate
  modified_base 16: mod_base = OTHER; note = 2'-deoxy-2'-fluorocytidine-3'-phosphate
  modified_base 17: mod_base = OTHER; note = 2'-O-methylcytidine-3'-phosphate
  modified_base 18: mod_base = OTHER; note = 2'-O-methyladenosine-3'-phosphate
  modified_base 19: mod_base = OTHER; note = 2'-O-methylguanosine-3'-phosphate
  modified_base 20: mod_base = OTHER; note = 2'-O-methyladenosine-3'-phosphate
  modified_base 21: mod_base = OTHER; note = 2'-O-methylguanosine-3'-phosphorothioate
  modified_base 22: mod_base = OTHER; note = 2'-O-methylcytidine-3'-phosphorothioate
  modified_base 23: mod_base = OTHER; note = 2'-O-methyluridine
tgcgactcctgagttccagagct

SEQ ID NO: 1049 - RNA, 23 nt, synthetic construct
  source 1..23: mol_type = other RNA
  modified_base 1: mod_base = OTHER; note = 2'-O-methyluridine-3'-phosphorothioate 5'-(E)-Vinylphosphonate
  modified_base 2: mod_base = OTHER; note = 2'-deoxy-2'-fluorouridine-3'-phosphorothioate
  modified_base 3: mod_base = OTHER; note = 2'-O-methylguanosine-3'-phosphate
  modified_base 4: mod_base = OTHER; note = 2'-O-methylcytidine-3'-phosphate
  modified_base 5: mod_base = OTHER; note = 2'-O-methylguanosine-3'-phosphate
  modified_base 6: mod_base = OTHER; note = 2'-O-methyluridine-3'-phosphate
  modified_base 7: mod_base = OTHER; note = cytidine-2'-phosphate
  modified_base 8: mod_base = OTHER; note = 2'-O-methylguanosine-3'-phosphate
  modified_base 9: mod_base = OTHER; note = 2'-O-methyladenosine-3'-phosphate
  modified_base 10: mod_base = OTHER; note = 2'-O-methylguanosine-3'-phosphate
  modified_base 11: mod_base = OTHER; note = 2'-O-methylcytidine-3'-phosphate
  modified_base 12: mod_base = OTHER; note = 2'-O-methyluridine-3'-phosphate
  modified_base 13: mod_base = OTHER; note = 2'-O-methylcytidine-3'-phosphate
  modified_base 14: mod_base = OTHER; note = 2'-deoxy-2'-fluorouridine-3'-phosphate
  modified_base 15: mod_base = OTHER; note = 2'-O-methylguanosine-3'-phosphate
  modified_base 16: mod_base = OTHER; note = 2'-deoxy-2'-fluoroadenosine-3'-phosphate
  modified_base 17: mod_base = OTHER; note = 2'-O-methylguanosine-3'-phosphate
  modified_base 18: mod_base = OTHER; note = 2'-O-methylguanosine-3'-phosphate
  modified_base 19: mod_base = OTHER; note = 2'-O-methyladenosine-3'-phosphate
  modified_base 20: mod_base = OTHER; note = 2'-O-methylguanosine-3'-phosphate
  modified_base 21: mod_base = OTHER; note = 2'-O-methyladenosine-3'-phosphorothioate
  modified_base 22: mod_base = OTHER; note = 2'-O-methylguanosine-3'-phosphorothioate
  modified_base 23: mod_base = OTHER; note = 2'-O-methylcytidine
ttgcgtcgagctctgaggagagc

SEQ ID NO: 1050 - RNA, 23 nt, synthetic construct
  source 1..23: mol_type = other RNA
  modified_base 1: mod_base = OTHER; note = 2'-O-methyluridine-3'-phosphorothioate 5'-(E)-Vinylphosphonate
  modified_base 2: mod_base = OTHER; note = 2'-deoxy-2'-fluoroadenosine-3'-phosphorothioate
  modified_base 3: mod_base = OTHER; note = 2'-O-methyladenosine-3'-phosphate
  modified_base 4: mod_base = OTHER; note = 2'-O-methyluridine-3'-phosphate
  modified_base 5: mod_base = OTHER; note = 2'-O-methylguanosine-3'-phosphate
  modified_base 6: mod_base = OTHER; note = 2'-O-methylcytidine-3'-phosphate
  modified_base 7: mod_base = OTHER; note = guanosine-2'-phosphate
  modified_base 8: mod_base = OTHER; note = 2'-O-methyluridine-3'-phosphate
  modified_base 9: mod_base = OTHER; note = 2'-O-methylcytidine-3'-phosphate
  modified_base 10: mod_base = OTHER; note = 2'-O-methylguanosine-3'-phosphate
  modified_base 11: mod_base = OTHER; note = 2'-O-methyladenosine-3'-phosphate
  modified_base 12: mod_base = OTHER; note = 2'-O-methylguanosine-3'-phosphate
  modified_base 13: mod_base = OTHER; note = 2'-O-methylcytidine-3'-phosphate
  modified_base 14: mod_base = OTHER; note = 2'-deoxy-2'-fluorouridine-3'-phosphate
  modified_base 15: mod_base = OTHER; note = 2'-O-methylcytidine-3'-phosphate
  modified_base 16: mod_base = OTHER; note = 2'-deoxy-2'-fluorouridine-3'-phosphate
  modified_base 17: mod_base = OTHER; note = 2'-O-methylguanosine-3'-phosphate
  modified_base 18: mod_base = OTHER; note = 2'-O-methyladenosine-3'-phosphate
  modified_base 19: mod_base = OTHER; note = 2'-O-methylguanosine-3'-phosphate
  modified_base 20: mod_base = OTHER; note = 2'-O-methylguanosine-3'-phosphate
  modified_base 21: mod_base = OTHER; note = 2'-O-methyladenosine-3'-phosphorothioate
  modified_base 22: mod_base = OTHER; note = 2'-O-methylguanosine-3'-phosphorothioate
  modified_base 23: mod_base = OTHER; note = 2'-O-methyladenosine
taatgcgtcgagctctgaggaga

SEQ ID NO: 1051 - RNA, 23 nt, synthetic construct
  source 1..23: mol_type = other RNA
  modified_base 1: mod_base = OTHER; note = 2'-O-methyluridine-3'-phosphorothioate 5'-(E)-Vinylphosphonate
  modified_base 2: mod_base = OTHER; note = 2'-deoxy-2'-fluoroadenosine-3'-phosphorothioate
  modified_base 3: mod_base = OTHER; note = 2'-O-methylguanosine-3'-phosphate
  modified_base 4: mod_base = OTHER; note = 2'-O-methyladenosine-3'-phosphate
  modified_base 5: mod_base = OTHER; note = 2'-O-methylguanosine-3'-phosphate
  modified_base 6: mod_base = OTHER; note = 2'-deoxy-2'-fluoroadenosine-3'-phosphate
  modified_base 7: mod_base = OTHER; note = 2'-O-methyladenosine-3'-phosphate
  modified_base 8: mod_base = OTHER; note = 2'-deoxy-2'-fluoroadenosine-3'-phosphate
  modified_base 9: mod_base = OTHER; note = 2'-deoxy-2'-fluorouridine-3'-phosphate
  modified_base 10: mod_base = OTHER; note = 2'-O-methylguanosine-3'-phosphate
  modified_base 11: mod_base = OTHER; note = 2'-O-methyladenosine-3'-phosphate
  modified_base 12: mod_base = OTHER; note = 2'-O-methylguanosine-3'-phosphate
  modified_base 13: mod_base = OTHER; note = 2'-O-methyladenosine-3'-phosphate
  modified_base 14: mod_base = OTHER; note = 2'-deoxy-2'-fluoroguanosine-3'-phosphate
  modified_base 15: mod_base = OTHER; note = 2'-O-methylguanosine-3'-phosphate
  modified_base 16: mod_base = OTHER; note = 2'-deoxy-2'-fluoroguanosine-3'-phosphate
  modified_base 17: mod_base = OTHER; note = 2'-O-methyladenosine-3'-phosphate
  modified_base 18: mod_base = OTHER; note = 2'-O-methyladenosine-3'-phosphate
  modified_base 19: mod_base = OTHER; note = 2'-O-methyladenosine-3'-phosphate
  modified_base 20: mod_base = OTHER; note = 2'-O-methylguanosine-3'-phosphate
  modified_base 21: mod_base = OTHER; note = 2'-O-methyluridine-3'-phosphorothioate
  modified_base 22: mod_base = OTHER; note = 2'-O-methyladenosine-3'-phosphorothioate
  modified_base 23: mod_base = OTHER; note = 2'-O-methyladenosine
tagagaaatgagagggaaagtaa

SEQ ID NO: 1052 - RNA, 23 nt, synthetic construct
  source 1..23: mol_type = other RNA
  modified_base 1: mod_base = OTHER; note = 2'-O-methyluridine-3'-phosphorothioate 5'-(E)-Vinylphosphonate
  modified_base 2: mod_base = OTHER; note = 2'-deoxy-2'-fluorocytidine-3'-phosphorothioate
  modified_base 3: mod_base = OTHER; note = 2'-O-methyladenosine-3'-phosphate
  modified_base 4: mod_base = OTHER; note = 2'-O-methylguanosine-3'-phosphate
  modified_base 5: mod_base = OTHER; note = 2'-O-methyladenosine-3'-phosphate
  modified_base 6: mod_base = OTHER; note = 2'-deoxy-2'-fluoroguanosine-3'-phosphate
  modified_base 7: mod_base = OTHER; note = 2'-O-methyladenosine-3'-phosphate
  modified_base 8: mod_base = OTHER; note = 2'-deoxy-2'-fluoroadenosine-3'-phosphate
  modified_base 9: mod_base = OTHER; note = 2'-deoxy-2'-fluoroadenosine-3'-phosphate
  modified_base 10: mod_base = OTHER; note = 2'-O-methyluridine-3'-phosphate
  modified_base 11: mod_base = OTHER; note = 2'-O-methylguanosine-3'-phosphate
  modified_base 12: mod_base = OTHER; note = 2'-O-methyladenosine-3'-phosphate
  modified_base 13: mod_base = OTHER; note = 2'-O-methylguanosine-3'-phosphate
  modified_base 14: mod_base = OTHER; note = 2'-deoxy-2'-fluoroadenosine-3'-phosphate
  modified_base 15: mod_base = OTHER; note = 2'-O-methylguanosine-3'-phosphate
  modified_base 16: mod_base = OTHER; note = 2'-deoxy-2'-fluoroguanosine-3'-phosphate
  modified_base 17: mod_base = OTHER; note = 2'-O-methylguanosine-3'-phosphate
  modified_base 18: mod_base = OTHER; note = 2'-O-methyladenosine-3'-phosphate
  modified_base 19: mod_base = OTHER; note = 2'-O-methyladenosine-3'-phosphate
  modified_base 20: mod_base = OTHER; note = 2'-O-methyladenosine-3'-phosphate
  modified_base 21: mod_base = OTHER; note = 2'-O-methylguanosine-3'-phosphorothioate
  modified_base 22: mod_base = OTHER; note = 2'-O-methyluridine-3'-phosphorothioate
  modified_base 23: mod_base = OTHER; note = 2'-O-methyladenosine
tcagagaaatgagagggaaagta

SEQ ID NO: 1053 - RNA, 23 nt, synthetic construct
  source 1..23: mol_type = other RNA
  modified_base 1: mod_base = OTHER; note = 2'-O-methyluridine-3'-phosphorothioate 5'-(E)-Vinylphosphonate
  modified_base 2: mod_base = OTHER; note = 2'-deoxy-2'-fluorouridine-3'-phosphorothioate
  modified_base 3: mod_base = OTHER; note = 2'-O-methylcytidine-3'-phosphate
  modified_base 4: mod_base = OTHER; note = 2'-O-methyladenosine-3'-phosphate
  modified_base 5: mod_base = OTHER; note = 2'-O-methylguanosine-3'-phosphate
  modified_base 6: mod_base = OTHER; note = 2'-O-methyladenosine-3'-phosphate
  modified_base 7: mod_base = OTHER; note = guanosine-2'-phosphate
  modified_base 8: mod_base = OTHER; note = 2'-O-methyladenosine-3'-phosphate
  modified_base 9: mod_base = OTHER; note = 2'-O-methyladenosine-3'-phosphate
  modified_base 10: mod_base = OTHER; note = 2'-O-methyladenosine-3'-phosphate
  modified_base 11: mod_base = OTHER; note = 2'-O-methyluridine-3'-phosphate
  modified_base 12: mod_base = OTHER; note = 2'-O-methylguanosine-3'-phosphate
  modified_base 13: mod_base = OTHER; note = 2'-O-methyladenosine-3'-phosphate
  modified_base 14: mod_base = OTHER; note = 2'-deoxy-2'-fluoroguanosine-3'-phosphate
  modified_base 15: mod_base = OTHER; note = 2'-O-methyladenosine-3'-phosphate
  modified_base 16: mod_base = OTHER; note = 2'-deoxy-2'-fluoroguanosine-3'-phosphate
  modified_base 17: mod_base = OTHER; note = 2'-O-methylguanosine-3'-phosphate
  modified_base 18: mod_base = OTHER; note = 2'-O-methylguanosine-3'-phosphate
  modified_base 19: mod_base = OTHER; note = 2'-O-methyladenosine-3'-phosphate
  modified_base 20: mod_base = OTHER; note = 2'-O-methyladenosine-3'-phosphate
  modified_base 21: mod_base = OTHER; note = 2'-O-methyladenosine-3'-phosphorothioate
  modified_base 22: mod_base = OTHER; note = 2'-O-methylguanosine-3'-phosphorothioate
  modified_base 23: mod_base = OTHER; note = 2'-O-methyluridine
ttcagagaaatgagagggaaagt

SEQ ID NO: 1054 - RNA, 23 nt, synthetic construct
  source 1..23: mol_type = other RNA
  modified_base 1: mod_base = OTHER; note = 2'-O-methyluridine-3'-phosphorothioate 5'-(E)-Vinylphosphonate
  modified_base 2: mod_base = OTHER; note = 2'-deoxy-2'-fluoroguanosine-3'-phosphorothioate
  modified_base 3: mod_base = OTHER; note = 2'-O-methylguanosine-3'-phosphate
  modified_base 4: mod_base = OTHER; note = 2'-O-methyluridine-3'-phosphate
  modified_base 5: mod_base = OTHER; note = 2'-O-methylcytidine-3'-phosphate
  modified_base 6: mod_base = OTHER; note = 2'-O-methyladenosine-3'-phosphate
  modified_base 7: mod_base = OTHER; note = guanosine-2'-phosphate
  modified_base 8: mod_base = OTHER; note = 2'-O-methyladenosine-3'-phosphate
  modified_base 9: mod_base = OTHER; note = 2'-O-methylguanosine-3'-phosphate
  modified_base 10: mod_base = OTHER; note = 2'-O-methyladenosine-3'-phosphate
  modified_base 11: mod_base = OTHER; note = 2'-O-methyladenosine-3'-phosphate
  modified_base 12: mod_base = OTHER; note = 2'-O-methyladenosine-3'-phosphate
  modified_base 13: mod_base = OTHER; note = 2'-O-methyluridine-3'-phosphate
  modified_base 14: mod_base = OTHER; note = 2'-deoxy-2'-fluoroguanosine-3'-phosphate
  modified_base 15: mod_base = OTHER; note = 2'-O-methyladenosine-3'-phosphate
  modified_base 16: mod_base = OTHER; note = 2'-deoxy-2'-fluoroguanosine-3'-phosphate
  modified_base 17: mod_base = OTHER; note = 2'-O-methyladenosine-3'-phosphate
  modified_base 18: mod_base = OTHER; note = 2'-O-methylguanosine-3'-phosphate
  modified_base 19: mod_base = OTHER; note = 2'-O-methylguanosine-3'-phosphate
  modified_base 20: mod_base = OTHER; note = 2'-O-methylguanosine-3'-phosphate
  modified_base 21: mod_base = OTHER; note = 2'-O-methyladenosine-3'-phosphorothioate
  modified_base 22: mod_base = OTHER; note = 2'-O-methyladenosine-3'-phosphorothioate
  modified_base 23: mod_base = OTHER; note = 2'-O-methyladenosine
tggtcagagaaatgagagggaaa

SEQ ID NO: 1055 - RNA, 23 nt, synthetic construct
  source 1..23: mol_type = other RNA
  modified_base 1: mod_base = OTHER; note = 2'-O-methyluridine-3'-phosphorothioate 5'-(E)-Vinylphosphonate
  modified_base 2: mod_base = OTHER; note = 2'-deoxy-2'-fluorocytidine-3'-phosphorothioate
  modified_base 3: mod_base = OTHER; note = 2'-O-methylguanosine-3'-phosphate
  modified_base 4: mod_base = OTHER; note = 2'-O-methylguanosine-3'-phosphate
  modified_base 5: mod_base = OTHER; note = 2'-O-methyluridine-3'-phosphate
  modified_base 6: mod_base = OTHER; note = 2'-O-methylcytidine-3'-phosphate
  modified_base 7: mod_base = OTHER; note = Adenosine-glycol nucleic acid (GNA), S-isomer
  modified_base 8: mod_base = OTHER; note = 2'-O-methylguanosine-3'-phosphate
  modified_base 9: mod_base = OTHER; note = 2'-O-methyladenosine-3'-phosphate
  modified_base 10: mod_base = OTHER; note = 2'-O-methylguanosine-3'-phosphate
  modified_base 11: mod_base = OTHER; note = 2'-O-methyladenosine-3'-phosphate
  modified_base 12: mod_base = OTHER; note = 2'-O-methyladenosine-3'-phosphate
  modified_base 13: mod_base = OTHER; note = 2'-O-methyladenosine-3'-phosphate
  modified_base 14: mod_base = OTHER; note = 2'-deoxy-2'-fluorouridine-3'-phosphate
  modified_base 15: mod_base = OTHER; note = 2'-O-methylguanosine-3'-phosphate
  modified_base 16: mod_base = OTHER; note = 2'-deoxy-2'-fluoroadenosine-3'-phosphate
  modified_base 17: mod_base = OTHER; note = 2'-O-methylguanosine-3'-phosphate
  modified_base 18: mod_base = OTHER; note = 2'-O-methyladenosine-3'-phosphate
  modified_base 19: mod_base = OTHER; note = 2'-O-methylguanosine-3'-phosphate
  modified_base 20: mod_base = OTHER; note = 2'-O-methylguanosine-3'-phosphate
  modified_base 21: mod_base = OTHER; note = 2'-O-methylguanosine-3'-phosphorothioate
  modified_base 22: mod_base = OTHER; note = 2'-O-methyladenosine-3'-phosphorothioate
  modified_base 23: mod_base = OTHER; note = 2'-O-methyladenosine
tcggtcagagaaatgagagggaa

SEQ ID NO: 1056 - RNA, 23 nt, synthetic construct
  source 1..23: mol_type = other RNA
  modified_base 1: mod_base = OTHER; note = 2'-O-methyluridine-3'-phosphorothioate 5'-(E)-Vinylphosphonate
  modified_base 2: mod_base = OTHER; note = 2'-deoxy-2'-fluorouridine-3'-phosphorothioate
  modified_base 3: mod_base = OTHER; note = 2'-O-methylcytidine-3'-phosphate
  modified_base 4: mod_base = OTHER; note = 2'-O-methylguanosine-3'-phosphate
  modified_base 5: mod_base = OTHER; note = 2'-O-methylguanosine-3'-phosphate
  modified_base 6: mod_base = OTHER; note = 2'-O-methyluridine-3'-phosphate
  modified_base 7: mod_base = OTHER; note = cytidine-2'-phosphate
  modified_base 8: mod_base = OTHER; note = 2'-O-methyladenosine-3'-phosphate
  modified_base 9: mod_base = OTHER; note = 2'-O-methylguanosine-3'-phosphate
  modified_base 10: mod_base = OTHER; note = 2'-O-methyladenosine-3'-phosphate
  modified_base 11: mod_base = OTHER; note = 2'-O-methylguanosine-3'-phosphate
  modified_base 12: mod_base = OTHER; note = 2'-O-methyladenosine-3'-phosphate
  modified_base 13: mod_base = OTHER; note = 2'-O-methyladenosine-3'-phosphate
  modified_base 14: mod_base = OTHER; note = 2'-deoxy-2'-fluoroadenosine-3'-phosphate
  modified_base 15: mod_base = OTHER; note = 2'-O-methyluridine-3'-phosphate
  modified_base 16: mod_base = OTHER; note = 2'-deoxy-2'-fluoroguanosine-3'-phosphate
  modified_base 17: mod_base = OTHER; note = 2'-O-methyladenosine-3'-phosphate
  modified_base 18: mod_base = OTHER; note = 2'-O-methylguanosine-3'-phosphate
  modified_base 19: mod_base = OTHER; note = 2'-O-methyladenosine-3'-phosphate
  modified_base 20: mod_base = OTHER; note = 2'-O-methylguanosine-3'-phosphate
  modified_base 21: mod_base = OTHER; note = 2'-O-methylguanosine-3'-phosphorothioate
  modified_base 22: mod_base = OTHER; note = 2'-O-methylguanosine-3'-phosphorothioate
  modified_base 23: mod_base = OTHER; note = 2'-O-methyladenosine
ttcggtcagagaaatgagaggga

SEQ ID NO: 1057 - RNA, 23 nt, synthetic construct
  source 1..23: mol_type = other RNA
  modified_base 1: mod_base = OTHER; note = 2'-O-methyluridine-3'-phosphorothioate 5'-(E)-Vinylphosphonate
  modified_base 2: mod_base = OTHER; note = 2'-deoxy-2'-fluorocytidine-3'-phosphorothioate
  modified_base 3: mod_base = OTHER; note = 2'-O-methyluridine-3'-phosphate
  modified_base 4: mod_base = OTHER; note = 2'-O-methyluridine-3'-phosphate
  modified_base 5: mod_base = OTHER; note = 2'-O-methylcytidine-3'-phosphate
  modified_base 6: mod_base = OTHER; note = 2'-O-methylguanosine-3'-phosphate
  modified_base 7: mod_base = OTHER; note = guanosine-2'-phosphate
  modified_base 8: mod_base = OTHER; note = 2'-O-methyluridine-3'-phosphate
  modified_base 9: mod_base = OTHER; note = 2'-O-methylcytidine-3'-phosphate
  modified_base 10: mod_base = OTHER; note = 2'-O-methyladenosine-3'-phosphate
  modified_base 11: mod_base = OTHER; note = 2'-O-methylguanosine-3'-phosphate
  modified_base 12: mod_base = OTHER; note = 2'-O-methyladenosine-3'-phosphate
  modified_base 13: mod_base = OTHER; note = 2'-O-methylguanosine-3'-phosphate
  modified_base 14: mod_base = OTHER; note = 2'-deoxy-2'-fluoroadenosine-3'-phosphate
  modified_base 15: mod_base = OTHER; note = 2'-O-methyladenosine-3'-phosphate
  modified_base 16: mod_base = OTHER; note = 2'-deoxy-2'-fluoroadenosine-3'-phosphate
  modified_base 17: mod_base = OTHER; note = 2'-O-methyluridine-3'-phosphate
  modified_base 18: mod_base = OTHER; note = 2'-O-methylguanosine-3'-phosphate
  modified_base 19: mod_base = OTHER; note = 2'-O-methyladenosine-3'-phosphate
  modified_base 20: mod_base = OTHER; note = 2'-O-methylguanosine-3'-phosphate
  modified_base 21: mod_base = OTHER; note = 2'-O-methyladenosine-3'-phosphorothioate
  modified_base 22: mod_base = OTHER; note = 2'-O-methylguanosine-3'-phosphorothioate
  modified_base 23: mod_base = OTHER; note = 2'-O-methylguanosine
tcttcggtcagagaaatgagagg

SEQ ID NO: 1058 - RNA, 23 nt, synthetic construct
  source 1..23: mol_type = other RNA
  modified_base 1: mod_base = OTHER; note = 2'-O-methyluridine-3'-phosphorothioate 5'-(E)-Vinylphosphonate
  modified_base 2: mod_base = OTHER; note = 2'-deoxy-2'-fluoroguanosine-3'-phosphorothioate
  modified_base 3: mod_base = OTHER; note = 2'-O-methylcytidine-3'-phosphate
  modified_base 4: mod_base = OTHER; note = 2'-O-methyluridine-3'-phosphate
  modified_base 5: mod_base = OTHER; note = 2'-O-methyluridine-3'-phosphate
  modified_base 6: mod_base = OTHER; note = 2'-O-methylcytidine-3'-phosphate
  modified_base 7: mod_base = OTHER; note = guanosine-2'-phosphate
  modified_base 8: mod_base = OTHER; note = 2'-O-methylguanosine-3'-phosphate
  modified_base 9: mod_base = OTHER; note = 2'-O-methyluridine-3'-phosphate
  modified_base 10: mod_base = OTHER; note = 2'-O-methylcytidine-3'-phosphate
  modified_base 11: mod_base = OTHER; note = 2'-O-methyladenosine-3'-phosphate
  modified_base 12: mod_base = OTHER; note = 2'-O-methylguanosine-3'-phosphate
  modified_base 13: mod_base = OTHER; note = 2'-O-methyladenosine-3'-phosphate
  modified_base 14: mod_base = OTHER; note = 2'-deoxy-2'-fluoroguanosine-3'-phosphate
  modified_base 15: mod_base = OTHER; note = 2'-O-methyladenosine-3'-phosphate
  modified_base 16: mod_base = OTHER; note = 2'-deoxy-2'-fluoroadenosine-3'-phosphate
  modified_base 17: mod_base = OTHER; note = 2'-O-methyladenosine-3'-phosphate
  modified_base 18: mod_base = OTHER; note = 2'-O-methyluridine-3'-phosphate
  modified_base 19: mod_base = OTHER; note = 2'-O-methylguanosine-3'-phosphate
  modified_base 20: mod_base = OTHER; note = 2'-O-methyladenosine-3'-phosphate
  modified_base 21: mod_base = OTHER; note = 2'-O-methylguanosine-3'-phosphorothioate
  modified_base 22: mod_base = OTHER; note = 2'-O-methyladenosine-3'-phosphorothioate
  modified_base 23: mod_base = OTHER; note = 2'-O-methylguanosine
tgcttcggtcagagaaatgagag

SEQ ID NO: 1059 - RNA, 23 nt, synthetic construct
  source 1..23: mol_type = other RNA
  modified_base 1: mod_base = OTHER; note = 2'-O-methyluridine-3'-phosphorothioate 5'-(E)-Vinylphosphonate
  modified_base 2: mod_base = OTHER; note = 2'-deoxy-2'-fluoroadenosine-3'-phosphorothioate
  modified_base 3: mod_base = OTHER; note = 2'-O-methylguanosine-3'-phosphate
  modified_base 4: mod_base = OTHER; note = 2'-O-methylcytidine-3'-phosphate
  modified_base 5: mod_base = OTHER; note = 2'-O-methyluridine-3'-phosphate
  modified_base 6: mod_base = OTHER; note = 2'-O-methyluridine-3'-phosphate
  modified_base 7: mod_base = OTHER; note = cytidine-2'-phosphate
  modified_base 8: mod_base = OTHER; note = 2'-O-methylguanosine-3'-phosphate
  modified_base 9: mod_base = OTHER; note = 2'-O-methylguanosine-3'-phosphate
  modified_base 10: mod_base = OTHER; note = 2'-O-methyluridine-3'-phosphate
  modified_base 11: mod_base = OTHER; note = 2'-O-methylcytidine-3'-phosphate
  modified_base 12: mod_base = OTHER; note = 2'-O-methyladenosine-3'-phosphate
  modified_base 13: mod_base = OTHER; note = 2'-O-methylguanosine-3'-phosphate
  modified_base 14: mod_base = OTHER; note = 2'-deoxy-2'-fluoroadenosine-3'-phosphate
  modified_base 15: mod_base = OTHER; note = 2'-O-methylguanosine-3'-phosphate
  modified_base 16: mod_base = OTHER; note = 2'-deoxy-2'-fluoroadenosine-3'-phosphate
  modified_base 17: mod_base = OTHER; note = 2'-O-methyladenosine-3'-phosphate
  modified_base 18: mod_base = OTHER; note = 2'-O-methyladenosine-3'-phosphate
  modified_base 19: mod_base = OTHER; note = 2'-O-methyluridine-3'-phosphate
  modified_base 20: mod_base = OTHER; note = 2'-O-methylguanosine-3'-phosphate
  modified_base 21: mod_base = OTHER; note = 2'-O-methyladenosine-3'-phosphorothioate
  modified_base 22: mod_base = OTHER; note = 2'-O-methylguanosine-3'-phosphorothioate
  modified_base 23: mod_base = OTHER; note = 2'-O-methyladenosine
tagcttcggtcagagaaatgaga

SEQ ID NO: 1060 - RNA, 23 nt, synthetic construct
  source 1..23: mol_type = other RNA
  modified_base 1: mod_base = OTHER; note = 2'-O-methyluridine-3'-phosphorothioate 5'-(E)-Vinylphosphonate
  modified_base 2: mod_base = OTHER; note = 2'-deoxy-2'-fluoroadenosine-3'-phosphorothioate
  modified_base 3: mod_base = OTHER; note = 2'-O-methylcytidine-3'-phosphate
  modified_base 4: mod_base = OTHER; note = 2'-O-methyladenosine-3'-phosphate
  modified_base 5: mod_base = OTHER; note = 2'-O-methylcytidine-3'-phosphate
  modified_base 6: mod_base = OTHER; note = 2'-O-methylcytidine-3'-phosphate
  modified_base 7: mod_base = OTHER; note = cytidine-2'-phosphate
  modified_base 8: mod_base = OTHER; note = 2'-O-methyladenosine-3'-phosphate
  modified_base 9: mod_base = OTHER; note = 2'-O-methylguanosine-3'-phosphate
  modified_base 10: mod_base = OTHER; note = 2'-O-methylcytidine-3'-phosphate
  modified_base 11: mod_base = OTHER; note = 2'-O-methyluridine-3'-phosphate
  modified_base 12: mod_base = OTHER; note = 2'-O-methyluridine-3'-phosphate
  modified_base 13: mod_base = OTHER; note = 2'-O-methylcytidine-3'-phosphate
  modified_base 14: mod_base = OTHER; note = 2'-deoxy-2'-fluoroguanosine-3'-phosphate
  modified_base 15: mod_base = OTHER; note = 2'-O-methylguanosine-3'-phosphate
  modified_base 16: mod_base = OTHER; note = 2'-deoxy-2'-fluorouridine-3'-phosphate
  modified_base 17: mod_base = OTHER; note = 2'-O-methylcytidine-3'-phosphate
  modified_base 18: mod_base = OTHER; note = 2'-O-methyladenosine-3'-phosphate
  modified_base 19: mod_base = OTHER; note = 2'-O-methylguanosine-3'-phosphate
  modified_base 20: mod_base = OTHER; note = 2'-O-methyladenosine-3'-phosphate
  modified_base 21: mod_base = OTHER; note = 2'-O-methylguanosine-3'-phosphorothioate
  modified_base 22: mod_base = OTHER; note = 2'-O-methyladenosine-3'-phosphorothioate
  modified_base 23: mod_base = OTHER; note = 2'-O-methyladenosine
tacacccagcttcggtcagagaa

SEQ ID NO: 1061 - RNA, 23 nt, synthetic construct
  source 1..23: mol_type = other RNA
  modified_base 1: mod_base = OTHER; note = 2'-O-methyluridine-3'-phosphorothioate 5'-(E)-Vinylphosphonate
  modified_base 2: mod_base = OTHER; note = 2'-deoxy-2'-fluoroadenosine-3'-phosphorothioate
  modified_base 3: mod_base = OTHER; note = 2'-O-methylguanosine-3'-phosphate
  modified_base 4: mod_base = OTHER; note = 2'-O-methyladenosine-3'-phosphate
  modified_base 5: mod_base = OTHER; note = 2'-O-methylguanosine-3'-phosphate
  modified_base 6: mod_base = OTHER; note = 2'-O-methylguanosine-3'-phosphate
  modified_base 7: mod_base = OTHER; note = cytidine-2'-phosphate
  modified_base 8: mod_base = OTHER; note = 2'-O-methylguanosine-3'-phosphate
  modified_base 9: mod_base = OTHER; note = 2'-O-methyladenosine-3'-phosphate
  modified_base 10: mod_base = OTHER; note = 2'-O-methyladenosine-3'-phosphate
  modified_base 11: mod_base = OTHER; note = 2'-O-methyladenosine-3'-phosphate
  modified_base 12: mod_base = OTHER; note = 2'-O-methylguanosine-3'-phosphate
  modified_base 13: mod_base = OTHER; note = 2'-O-methylcytidine-3'-phosphate
  modified_base 14: mod_base = OTHER; note = 2'-deoxy-2'-fluorocytidine-3'-phosphate
  modified_base 15: mod_base = OTHER; note = 2'-O-methylcytidine-3'-phosphate
  modified_base 16: mod_base = OTHER; note = 2'-deoxy-2'-fluoroguanosine-3'-phosphate
  modified_base 17: mod_base = OTHER; note = 2'-O-methyladenosine-3'-phosphate
  modified_base 18: mod_base = OTHER; note = 2'-O-methylcytidine-3'-phosphate
  modified_base 19: mod_base = OTHER; note = 2'-O-methyladenosine-3'-phosphate
  modified_base 20: mod_base = OTHER; note = 2'-O-methylcytidine-3'-phosphate
  modified_base 21: mod_base = OTHER; note = 2'-O-methylcytidine-3'-phosphorothioate
  modified_base 22: mod_base = OTHER; note = 2'-O-methylcytidine-3'-phosphorothioate
  modified_base 23: mod_base = OTHER; note = 2'-O-methyladenosine
tagaggcgaaagcccgacaccca

SEQ ID NO: 1062 - RNA, 23 nt, synthetic construct
  source 1..23: mol_type = other RNA
  modified_base 1: mod_base = OTHER; note = 2'-O-methyluridine-3'-phosphorothioate 5'-(E)-Vinylphosphonate
  modified_base 2: mod_base = OTHER; note = 2'-deoxy-2'-fluorocytidine-3'-phosphorothioate
  modified_base 3: mod_base = OTHER; note = 2'-O-methylguanosine-3'-phosphate
  modified_base 4: mod_base = OTHER; note = 2'-O-methylcytidine-3'-phosphate
  modified_base 5: mod_base = OTHER; note = 2'-O-methyluridine-3'-phosphate
  modified_base 6: mod_base = OTHER; note = 2'-deoxy-2'-fluoroadenosine-3'-phosphate
  modified_base 7: mod_base = OTHER; note = 2'-O-methylguanosine-3'-phosphate
  modified_base 8: mod_base = OTHER; note = 2'-deoxy-2'-fluoroadenosine-3'-phosphate
  modified_base 9: mod_base = OTHER; note = 2'-deoxy-2'-fluoroguanosine-3'-phosphate
  modified_base 10: mod_base = OTHER; note = 2'-O-methylguanosine-3'-phosphate
  modified_base 11: mod_base = OTHER; note = 2'-O-methylcytidine-3'-phosphate
  modified_base 12: mod_base = OTHER; note = 2'-O-methylguanosine-3'-phosphate
  modified_base 13: mod_base = OTHER; note = 2'-O-methyladenosine-3'-phosphate
  modified_base 14: mod_base = OTHER; note = 2'-deoxy-2'-fluoroadenosine-3'-phosphate
  modified_base 15: mod_base = OTHER; note = 2'-O-methyladenosine-3'-phosphate
  modified_base 16: mod_base = OTHER; note = 2'-deoxy-2'-fluoroguanosine-3'-phosphate
  modified_base 17: mod_base = OTHER; note = 2'-O-methylcytidine-3'-phosphate
  modified_base 18: mod_base = OTHER; note = 2'-O-methylcytidine-3'-phosphate
  modified_base 19: mod_base = OTHER; note = 2'-O-methylcytidine-3'-phosphate
  modified_base 20: mod_base = OTHER; note = 2'-O-methylguanosine-3'-phosphate
  modified_base 21: mod_base = OTHER; note = 2'-O-methyladenosine-3'-phosphorothioate
  modified_base 22: mod_base = OTHER; note = 2'-O-methylcytidine-3'-phosphorothioate
  modified_base 23: mod_base = OTHER; note = 2'-O-methyladenosine
tcgctagaggcgaaagcccgaca

SEQ ID NO: 1063 - RNA, 23 nt, synthetic construct
  source 1..23: mol_type = other RNA
  modified_base 1: mod_base = OTHER; note = 2'-O-methyluridine-3'-phosphorothioate 5'-(E)-Vinylphosphonate
  modified_base 2: mod_base = OTHER; note = 2'-deoxy-2'-fluorocytidine-3'-phosphorothioate
  modified_base 3: mod_base = OTHER; note = 2'-O-methylcytidine-3'-phosphate
  modified_base 4: mod_base = OTHER; note = 2'-O-methyladenosine-3'-phosphate
  modified_base 5: mod_base = OTHER; note = 2'-O-methylguanosine-3'-phosphate
  modified_base 6: mod_base = OTHER; note = 2'-O-methyluridine-3'-phosphate
  modified_base 7: mod_base = OTHER; note = cytidine-2'-phosphate
  modified_base 8: mod_base = OTHER; note = 2'-O-methylguanosine-3'-phosphate
  modified_base 9: mod_base = OTHER; note = 2'-O-methylcytidine-3'-phosphate
  modified_base 10: mod_base = OTHER; note = 2'-O-methyluridine-3'-phosphate
  modified_base 11: mod_base = OTHER; note = 2'-O-methyladenosine-3'-phosphate
  modified_base 12: mod_base = OTHER; note = 2'-O-methylguanosine-3'-phosphate
  modified_base 13: mod_base = OTHER; note = 2'-O-methyladenosine-3'-phosphate
  modified_base 14: mod_base = OTHER; note = 2'-deoxy-2'-fluoroguanosine-3'-phosphate
  modified_base 15: mod_base = OTHER; note = 2'-O-methylguanosine-3'-phosphate
  modified_base 16: mod_base = OTHER; note = 2'-deoxy-2'-fluorocytidine-3'-phosphate
  modified_base 17: mod_base = OTHER; note = 2'-O-methylguanosine-3'-phosphate
  modified_base 18: mod_base = OTHER; note = 2'-O-methyladenosine-3'-phosphate
  modified_base 19: mod_base = OTHER; note = 2'-O-methyladenosine-3'-phosphate
  modified_base 20: mod_base = OTHER; note = 2'-O-methyladenosine-3'-phosphate
  modified_base 21: mod_base = OTHER; note = 2'-O-methylguanosine-3'-phosphorothioate
  modified_base 22: mod_base = OTHER; note = 2'-O-methylcytidine-3'-phosphorothioate
  modified_base 23: mod_base = OTHER; note = 2'-O-methylcytidine
tccagtcgctagaggcgaaagcc

SEQ ID NO: 1064 - RNA, 23 nt, synthetic construct
  source 1..23: mol_type = other RNA
  modified_base 1: mod_base = OTHER; note = 2'-O-methyluridine-3'-phosphorothioate 5'-(E)-Vinylphosphonate
  modified_base 2: mod_base = OTHER; note = 2'-deoxy-2'-fluorocytidine-3'-phosphorothioate
  modified_base 3: mod_base = OTHER; note = 2'-O-methyladenosine-3'-phosphate
  modified_base 4: mod_base = OTHER; note = 2'-O-methylcytidine-3'-phosphate
  modified_base 5: mod_base = OTHER; note = 2'-O-methylcytidine-3'-phosphate
  modified_base 6: mod_base = OTHER; note = 2'-deoxy-2'-fluoroadenosine-3'-phosphate
  modified_base 7: mod_base = OTHER; note = 2'-O-methylguanosine-3'-phosphate
  modified_base 8: mod_base = OTHER; note = 2'-deoxy-2'-fluorouridine-3'-phosphate
  modified_base 9: mod_base = OTHER; note = 2'-deoxy-2'-fluorocytidine-3'-phosphate
  modified_base 10: mod_base = OTHER; note = 2'-O-methylguanosine-3'-phosphate
  modified_base 11: mod_base = OTHER; note = 2'-O-methylcytidine-3'-phosphate
  modified_base 12: mod_base = OTHER; note = 2'-O-methyluridine-3'-phosphate
  modified_base 13: mod_base = OTHER; note = 2'-O-methyladenosine-3'-phosphate
  modified_base 14: mod_base = OTHER; note = 2'-deoxy-2'-fluoroguanosine-3'-phosphate
  modified_base 15: mod_base = OTHER; note = 2'-O-methyladenosine-3'-phosphate
  modified_base 16: mod_base = OTHER; note = 2'-deoxy-2'-fluoroguanosine-3'-phosphate
  modified_base 17: mod_base = OTHER; note = 2'-O-methylguanosine-3'-phosphate
  modified_base 18: mod_base = OTHER; note = 2'-O-methylcytidine-3'-phosphate
  modified_base 19: mod_base = OTHER; note = 2'-O-methylguanosine-3'-phosphate
  modified_base 20: mod_base = OTHER; note = 2'-O-methyladenosine-3'-phosphate
  modified_base 21: mod_base = OTHER; note = 2'-O-methyladenosine-3'-phosphorothioate
  modified_base 22: mod_base = OTHER; note = 2'-O-methyladenosine-3'-phosphorothioate
  modified_base 23: mod_base = OTHER; note = 2'-O-methylguanosine
tcaccagtcgctagaggcgaaag

SEQ ID NO: 1065 - RNA, 23 nt, synthetic construct
  source 1..23: mol_type = other RNA
  modified_base 1: mod_base = OTHER; note = 2'-O-methyluridine-3'-phosphorothioate 5'-(E)-Vinylphosphonate
  modified_base 2: mod_base = OTHER; note = 2'-deoxy-2'-fluorocytidine-3'-phosphorothioate
  modified_base 3: mod_base = OTHER; note = 2'-O-methylcytidine-3'-phosphate
  modified_base 4: mod_base = OTHER; note = 2'-O-methyladenosine-3'-phosphate
  modified_base 5: mod_base = OTHER; note = 2'-O-methylcytidine-3'-phosphate
  modified_base 6: mod_base = OTHER; note = 2'-deoxy-2'-fluorocytidine-3'-phosphate
  modified_base 7: mod_base = OTHER; note = 2'-O-methyladenosine-3'-phosphate
  modified_base 8: mod_base = OTHER; note = 2'-deoxy-2'-fluoroguanosine-3'-phosphate
  modified_base 9: mod_base = OTHER; note = 2'-deoxy-2'-fluorouridine-3'-phosphate
  modified_base 10: mod_base = OTHER; note = 2'-O-methylcytidine-3'-phosphate
  modified_base 11: mod_base = OTHER; note = 2'-O-methylguanosine-3'-phosphate
  modified_base 12: mod_base = OTHER; note = 2'-O-methylcytidine-3'-phosphate
  modified_base 13: mod_base = OTHER; note = 2'-O-methyluridine-3'-phosphate
  modified_base 14: mod_base = OTHER; note = 2'-deoxy-2'-fluoroadenosine-3'-phosphate
  modified_base 15: mod_base = OTHER; note = 2'-O-methylguanosine-3'-phosphate
  modified_base 16: mod_base = OTHER; note = 2'-deoxy-2'-fluoroadenosine-3'-phosphate
  modified_base 17: mod_base = OTHER; note = 2'-O-methylguanosine-3'-phosphate
  modified_base 18: mod_base = OTHER; note = 2'-O-methylguanosine-3'-phosphate
  modified_base 19: mod_base = OTHER; note = 2'-O-methylcytidine-3'-phosphate
  modified_base 20: mod_base = OTHER; note = 2'-O-methylguanosine-3'-phosphate
  modified_base 21: mod_base = OTHER; note = 2'-O-methyladenosine-3'-phosphorothioate
  modified_base 22: mod_base = OTHER; note = 2'-O-methyladenosine-3'-phosphorothioate
  modified_base 23: mod_base = OTHER; note = 2'-O-methyladenosine
tccaccagtcgctagaggcgaaa

SEQ ID NO: 1066 - RNA, 23 nt, synthetic construct
  source 1..23: mol_type = other RNA
  modified_base 1: mod_base = OTHER; note = 2'-O-methyluridine-3'-phosphorothioate 5'-(E)-Vinylphosphonate
  modified_base 2: mod_base = OTHER; note = 2'-deoxy-2'-fluorouridine-3'-phosphorothioate
  modified_base 3: mod_base = OTHER; note = 2'-O-methylcytidine-3'-phosphate
  modified_base 4: mod_base = OTHER; note = 2'-O-methylcytidine-3'-phosphate
  modified_base 5: mod_base = OTHER; note = 2'-O-methyladenosine-3'-phosphate
  modified_base 6: mod_base = OTHER; note = 2'-O-methylcytidine-3'-phosphate
  modified_base 7: mod_base = OTHER; note = cytidine-2'-phosphate
  modified_base 8: mod_base = OTHER; note = 2'-O-methyladenosine-3'-phosphate
  modified_base 9: mod_base = OTHER; note = 2'-O-methylguanosine-3'-phosphate
  modified_base 10: mod_base = OTHER; note = 2'-O-methyluridine-3'-phosphate
  modified_base 11: mod_base = OTHER; note = 2'-O-methylcytidine-3'-phosphate
  modified_base 12: mod_base = OTHER; note = 2'-O-methylguanosine-3'-phosphate
  modified_base 13: mod_base = OTHER; note = 2'-O-methylcytidine-3'-phosphate
  modified_base 14: mod_base = OTHER; note = 2'-deoxy-2'-fluorouridine-3'-phosphate
  modified_base 15: mod_base = OTHER; note = 2'-O-methyladenosine-3'-phosphate
  modified_base 16: mod_base = OTHER; note = 2'-deoxy-2'-fluoroguanosine-3'-phosphate
  modified_base 17: mod_base = OTHER; note = 2'-O-methyladenosine-3'-phosphate
  modified_base 18: mod_base = OTHER; note = 2'-O-methylguanosine-3'-phosphate
  modified_base 19: mod_base = OTHER; note = 2'-O-methylguanosine-3'-phosphate
  modified_base 20: mod_base = OTHER; note = 2'-O-methylcytidine-3'-phosphate
  modified_base 21: mod_base = OTHER; note = 2'-O-methylguanosine-3'-phosphorothioate
  modified_base 22: mod_base = OTHER; note = 2'-O-methyladenosine-3'-phosphorothioate
  modified_base 23: mod_base = OTHER; note = 2'-O-methyladenosine
ttccaccagtcgctagaggcgaa

SEQ ID NO: 1067 - RNA, 23 nt, synthetic construct
  source 1..23: mol_type = other RNA
  modified_base 1: mod_base = OTHER; note = 2'-O-methyluridine-3'-phosphorothioate 5'-(E)-Vinylphosphonate
  modified_base 2: mod_base = OTHER; note = 2'-deoxy-2'-fluorouridine-3'-phosphorothioate
  modified_base 3: mod_base = OTHER; note = 2'-O-methyluridine-3'-phosphate
  modified_base 4: mod_base = OTHER; note = 2'-O-methylcytidine-3'-phosphate
  modified_base 5: mod_base = OTHER; note = 2'-O-methylcytidine-3'-phosphate
  modified_base 6: mod_base = OTHER; note = 2'-O-methyladenosine-3'-phosphate
  modified_base 7: mod_base = OTHER; note = cytidine-2'-phosphate
  modified_base 8: mod_base = OTHER; note = 2'-O-methylcytidine-3'-phosphate
  modified_base 9: mod_base = OTHER; note = 2'-O-methyladenosine-3'-phosphate
  modified_base 10: mod_base = OTHER; note = 2'-O-methylguanosine-3'-phosphate
  modified_base 11: mod_base = OTHER; note = 2'-O-methyluridine-3'-phosphate
  modified_base 12: mod_base = OTHER; note = 2'-O-methylcytidine-3'-phosphate
  modified_base 13: mod_base = OTHER; note = 2'-O-methylguanosine-3'-phosphate
  modified_base 14: mod_base = OTHER; note = 2'-deoxy-2'-fluorocytidine-3'-phosphate
  modified_base 15: mod_base = OTHER; note = 2'-O-methyluridine-3'-phosphate
  modified_base 16: mod_base = OTHER; note = 2'-deoxy-2'-fluoroadenosine-3'-phosphate
  modified_base 17: mod_base = OTHER; note = 2'-O-methylguanosine-3'-phosphate
  modified_base 18: mod_base = OTHER; note = 2'-O-methyladenosine-3'-phosphate
  modified_base 19: mod_base = OTHER; note = 2'-O-methylguanosine-3'-phosphate
  modified_base 20: mod_base = OTHER; note = 2'-O-methylguanosine-3'-phosphate
  modified_base 21: mod_base = OTHER; note = 2'-O-methylcytidine-3'-phosphorothioate
  modified_base 22: mod_base = OTHER; note = 2'-O-methylguanosine-3'-phosphorothioate
  modified_base 23: mod_base = OTHER; note = 2'-O-methyladenosine
tttccaccagtcgctagaggcga

SEQ ID NO: 1068 - RNA, 23 nt, synthetic construct
  source 1..23: mol_type = other RNA
  modified_base 1: mod_base = OTHER; note = 2'-O-methyluridine-3'-phosphorothioate 5'-(E)-Vinylphosphonate
  modified_base 2: mod_base = OTHER; note = 2'-deoxy-2'-fluoroadenosine-3'-phosphorothioate
  modified_base 3: mod_base = OTHER; note = 2'-O-methyladenosine-3'-phosphate
  modified_base 4: mod_base = OTHER; note = 2'-O-methyluridine-3'-phosphate
  modified_base 5: mod_base = OTHER; note = 2'-O-methyluridine-3'-phosphate
  modified_base 6: mod_base = OTHER; note = 2'-O-methylcytidine-3'-phosphate
  modified_base 7: mod_base = OTHER; note = cytidine-2'-phosphate
  modified_base 8: mod_base = OTHER; note = 2'-O-methyladenosine-3'-phosphate
  modified_base 9: mod_base = OTHER; note = 2'-O-methylcytidine-3'-phosphate
  modified_base 10: mod_base = OTHER; note = 2'-O-methylcytidine-3'-phosphate
  modified_base 11: mod_base = OTHER; note = 2'-O-methyladenosine-3'-phosphate
  modified_base 12: mod_base = OTHER; note = 2'-O-methylguanosine-3'-phosphate
  modified_base 13: mod_base = OTHER; note = 2'-O-methyluridine-3'-phosphate
  modified_base 14: mod_base = OTHER; note = 2'-deoxy-2'-fluorocytidine-3'-phosphate
  modified_base 15: mod_base = OTHER; note = 2'-O-methylguanosine-3'-phosphate
  modified_base 16: mod_base = OTHER; note = 2'-deoxy-2'-fluorocytidine-3'-phosphate
  modified_base 17: mod_base = OTHER; note = 2'-O-methyluridine-3'-phosphate
  modified_base 18: mod_base = OTHER; note = 2'-O-methyladenosine-3'-phosphate
  modified_base 19: mod_base = OTHER; note = 2'-O-methylguanosine-3'-phosphate
  modified_base 20: mod_base = OTHER; note = 2'-O-methyladenosine-3'-phosphate
  modified_base 21: mod_base = OTHER; note = 2'-O-methylguanosine-3'-phosphorothioate
  modified_base 22: mod_base = OTHER; note = 2'-O-methylguanosine-3'-phosphorothioate
  modified_base 23: mod_base = OTHER; note = 2'-O-methylcytidine
taattccaccagtcgctagaggc

SEQ ID NO: 1069 - RNA, 23 nt, synthetic construct
  source 1..23: mol_type = other RNA
  modified_base 1: mod_base = OTHER; note = 2'-O-methyluridine-3'-phosphorothioate 5'-(E)-Vinylphosphonate
  modified_base 2: mod_base = OTHER; note = 2'-deoxy-2'-fluorocytidine-3'-phosphorothioate
  modified_base 3: mod_base = OTHER; note = 2'-O-methyladenosine-3'-phosphate
  modified_base 4: mod_base = OTHER; note = 2'-O-methyladenosine-3'-phosphate
  modified_base 5: mod_base = OTHER; note = 2'-O-methyluridine-3'-phosphate
  modified_base 6: mod_base = OTHER; note = 2'-O-methyluridine-3'-phosphate
  modified_base 7: mod_base = OTHER; note = cytidine-2'-phosphate
  modified_base 8: mod_base = OTHER; note = 2'-O-methylcytidine-3'-phosphate
  modified_base 9: mod_base = OTHER; note = 2'-O-methyladenosine-3'-phosphate
  modified_base 10: mod_base = OTHER; note = 2'-O-methylcytidine-3'-phosphate
  modified_base 11: mod_base = OTHER; note = 2'-O-methylcytidine-3'-phosphate
  modified_base 12: mod_base = OTHER; note = 2'-O-methyladenosine-3'-phosphate
  modified_base 13: mod_base = OTHER; note = 2'-O-methylguanosine-3'-phosphate
  modified_base 14: mod_base = OTHER; note = 2'-deoxy-2'-fluorouridine-3'-phosphate
  modified_base 15: mod_base = OTHER; note = 2'-O-methylcytidine-3'-phosphate
  modified_base 16: mod_base = OTHER; note = 2'-deoxy-2'-fluoroguanosine-3'-phosphate
  modified_base 17: mod_base = OTHER; note = 2'-O-methylcytidine-3'-phosphate
  modified_base 18: mod_base = OTHER; note = 2'-O-methyluridine-3'-phosphate
  modified_base 19: mod_base = OTHER; note = 2'-O-methyladenosine-3'-phosphate
  modified_base 20: mod_base = OTHER; note = 2'-O-methylguanosine-3'-phosphate
  modified_base 21: mod_base = OTHER; note = 2'-O-methyladenosine-3'-phosphorothioate
  modified_base 22: mod_base = OTHER; note = 2'-O-methylguanosine-3'-phosphorothioate
  modified_base 23: mod_base = OTHER; note = 2'-O-methylguanosine
tcaattccaccagtcgctagagg

SEQ ID NO: 1070 - RNA, 23 nt, synthetic construct
  source 1..23: mol_type = other RNA
  modified_base 1: mod_base = OTHER; note = 2'-O-methyluridine-3'-phosphorothioate 5'-(E)-Vinylphosphonate
  modified_base 2: mod_base = OTHER; note = 2'-deoxy-2'-fluorouridine-3'-phosphorothioate
  modified_base 3: mod_base = OTHER; note = 2'-O-methylguanosine-3'-phosphate
  modified_base 4: mod_base = OTHER; note = 2'-O-methylcytidine-3'-phosphate
  modified_base 5: mod_base = OTHER; note = 2'-O-methyladenosine-3'-phosphate
  modified_base 6: mod_base = OTHER; note = 2'-O-methylguanosine-3'-phosphate
  modified_base 7: mod_base = OTHER; note = guanosine-2'-phosphate
  modified_base 8: mod_base = OTHER; note = 2'-O-methylcytidine-3'-phosphate
  modified_base 9: mod_base = OTHER; note = 2'-O-methyladenosine-3'-phosphate
  modified_base 10: mod_base = OTHER; note = 2'-O-methyladenosine-3'-phosphate
  modified_base 11: mod_base = OTHER; note = 2'-O-methyluridine-3'-phosphate
  modified_base 12: mod_base = OTHER; note = 2'-O-methyluridine-3'-phosphate
  modified_base 13: mod_base = OTHER; note = 2'-O-methylcytidine-3'-phosphate
  modified_base 14: mod_base = OTHER; note = 2'-deoxy-2'-fluorocytidine-3'-phosphate
  modified_base 15: mod_base = OTHER; note = 2'-O-methyladenosine-3'-phosphate
  modified_base 16: mod_base = OTHER; note = 2'-deoxy-2'-fluorocytidine-3'-phosphate
  modified_base 17: mod_base = OTHER; note = 2'-O-methylcytidine-3'-phosphate
  modified_base 18: mod_base = OTHER; note = 2'-O-methyladenosine-3'-phosphate
  modified_base 19: mod_base = OTHER; note = 2'-O-methylguanosine-3'-phosphate
  modified_base 20: mod_base = OTHER; note = 2'-O-methyluridine-3'-phosphate
  modified_base 21: mod_base = OTHER; note = 2'-O-methylcytidine-3'-phosphorothioate
  modified_base 22: mod_base = OTHER; note = 2'-O-methylguanosine-3'-phosphorothioate
  modified_base 23: mod_base = OTHER; note = 2'-O-methylcytidine
ttgcaggcaattccaccagtcgc

SEQ ID NO: 1071 - RNA, 23 nt, synthetic construct
  source 1..23: mol_type = other RNA
  modified_base 1: mod_base = OTHER; note = 2'-O-methyluridine-3'-phosphorothioate 5'-(E)-Vinylphosphonate
  modified_base 2: mod_base = OTHER; note = 2'-deoxy-2'-fluoroadenosine-3'-phosphorothioate
  modified_base 3: mod_base = OTHER; note = 2'-O-methyluridine-3'-phosphate
  modified_base 4: mod_base = OTHER; note = 2'-O-methylguanosine-3'-phosphate
  modified_base 5: mod_base = OTHER; note = 2'-O-methylcytidine-3'-phosphate
  modified_base 6: mod_base = OTHER; note = 2'-O-methyladenosine-3'-phosphate
  modified_base 7: mod_base = OTHER; note = guanosine-2'-phosphate
  modified_base 8: mod_base = OTHER; note = 2'-O-methylguanosine-3'-phosphate
  modified_base 9: mod_base = OTHER; note = 2'-O-methylcytidine-3'-phosphate
  modified_base 10: mod_base = OTHER; note = 2'-O-methyladenosine-3'-phosphate
  modified_base 11: mod_base = OTHER; note = 2'-O-methyladenosine-3'-phosphate
  modified_base 12: mod_base = OTHER; note = 2'-O-methyluridine-3'-phosphate
  modified_base 13: mod_base = OTHER; note = 2'-O-methyluridine-3'-phosphate
  modified_base 14: mod_base = OTHER; note = 2'-deoxy-2'-fluorocytidine-3'-phosphate
  modified_base 15: mod_base = OTHER; note = 2'-O-methylcytidine-3'-phosphate
  modified_base 16: mod_base = OTHER; note = 2'-deoxy-2'-fluoroadenosine-3'-phosphate
  modified_base 17: mod_base = OTHER; note = 2'-O-methylcytidine-3'-phosphate
  modified_base 18: mod_base = OTHER; note = 2'-O-methylcytidine-3'-phosphate
  modified_base 19: mod_base = OTHER; note = 2'-O-methyladenosine-3'-phosphate
  modified_base 20: mod_base = OTHER; note = 2'-O-methylguanosine-3'-phosphate
  modified_base 21: mod_base = OTHER; note = 2'-O-methyluridine-3'-phosphorothioate
  modified_base 22: mod_base = OTHER; note = 2'-O-methylcytidine-3'-phosphorothioate
  modified_base 23: mod_base = OTHER; note = 2'-O-methylguanosine
tatgcaggcaattccaccagtcg

SEQ ID NO: 1072 - RNA, 23 nt, synthetic construct
  source 1..23: mol_type = other RNA
  modified_base 1: mod_base = OTHER; note = 2'-O-methyluridine-3'-phosphorothioate 5'-(E)-Vinylphosphonate
  modified_base 2: mod_base = OTHER; note = 2'-deoxy-2'-fluoroguanosine-3'-phosphorothioate
  modified_base 3: mod_base = OTHER; note = 2'-O-methylguanosine-3'-phosphate
  modified_base 4: mod_base = OTHER; note = 2'-O-methyladenosine-3'-phosphate
  modified_base 5: mod_base = OTHER; note = 2'-O-methyluridine-3'-phosphate
  modified_base 6: mod_base = OTHER; note = 2'-O-methylguanosine-3'-phosphate
  modified_base 7: mod_base = OTHER; note = cytidine-2'-phosphate
  modified_base 8: mod_base = OTHER; note = 2'-O-methyladenosine-3'-phosphate
  modified_base 9: mod_base = OTHER; note = 2'-O-methylguanosine-3'-phosphate
  modified_base 10: mod_base = OTHER; note = 2'-O-methylguanosine-3'-phosphate
  modified_base 11: mod_base = OTHER; note = 2'-O-methylcytidine-3'-phosphate
  modified_base 12: mod_base = OTHER; note = 2'-O-methyladenosine-3'-phosphate
  modified_base 13: mod_base = OTHER; note = 2'-O-methyladenosine-3'-phosphate
  modified_base 14: mod_base = OTHER; note = 2'-deoxy-2'-fluorouridine-3'-phosphate
  modified_base 15: mod_base = OTHER; note = 2'-O-methyluridine-3'-phosphate
  modified_base 16: mod_base = OTHER; note = 2'-deoxy-2'-fluorocytidine-3'-phosphate
  modified_base 17: mod_base = OTHER; note = 2'-O-methylcytidine-3'-phosphate
  modified_base 18: mod_base = OTHER; note = 2'-O-methyladenosine-3'-phosphate
  modified_base 19: mod_base = OTHER; note = 2'-O-methylcytidine-3'-phosphate
  modified_base 20: mod_base = OTHER; note = 2'-O-methylcytidine-3'-phosphate
  modified_base 21: mod_base = OTHER; note = 2'-O-methyladenosine-3'-phosphorothioate
  modified_base 22: mod_base = OTHER; note = 2'-O-methylguanosine-3'-phosphorothioate
  modified_base 23: mod_base = OTHER; note = 2'-O-methyluridine
tggatgcaggcaattccaccagt

SEQ ID NO: 1073 - RNA, 23 nt, synthetic construct
  source 1..23: mol_type = other RNA
  modified_base 1: mod_base = OTHER; note = 2'-O-methyluridine-3'-phosphorothioate 5'-(E)-Vinylphosphonate
  modified_base 2: mod_base = OTHER; note = 2'-deoxy-2'-fluoroadenosine-3'-phosphorothioate
  modified_base 3: mod_base = OTHER; note = 2'-O-methyladenosine-3'-phosphate
  modified_base 4: mod_base = OTHER; note = 2'-O-methyladenosine-3'-phosphate
  modified_base 5: mod_base = OTHER; note = 2'-O-methylguanosine-3'-phosphate
  modified_base 6: mod_base = OTHER; note = 2'-deoxy-2'-fluorocytidine-3'-phosphate
  modified_base 7: mod_base = OTHER; note = 2'-O-methyladenosine-3'-phosphate
  modified_base 8: mod_base = OTHER; note = 2'-deoxy-2'-fluoroadenosine-3'-phosphate
  modified_base 9: mod_base = OTHER; note = 2'-deoxy-2'-fluoroguanosine-3'-phosphate
  modified_base 10: mod_base = OTHER; note = 2'-O-methylguanosine-3'-phosphate
  modified_base 11: mod_base = OTHER; note = 2'-O-methyladenosine-3'-phosphate
  modified_base 12: mod_base = OTHER; note = 2'-O-methyladenosine-3'-phosphate
  modified_base 13: mod_base = OTHER; note = 2'-O-methylguanosine-3'-phosphate
  modified_base 14: mod_base = OTHER; note = 2'-deoxy-2'-fluoroadenosine-3'-phosphate
  modified_base 15: mod_base = OTHER; note = 2'-O-methylguanosine-3'-phosphate
  modified_base 16: mod_base = OTHER; note = 2'-deoxy-2'-fluoroguanosine-3'-phosphate
  modified_base 17: mod_base = OTHER; note = 2'-O-methylcytidine-3'-phosphate
  modified_base 18: mod_base = OTHER; note = 2'-O-methylcytidine-3'-phosphate
  modified_base 19: mod_base = OTHER; note = 2'-O-methyladenosine-3'-phosphate
  modified_base 20: mod_base = OTHER; note = 2'-O-methylguanosine-3'-phosphate
  modified_base 21: mod_base = OTHER; note = 2'-O-methyladenosine-3'-phosphorothioate
  modified_base 22: mod_base = OTHER; note = 2'-O-methyluridine-3'-phosphorothioate
  modified_base 23: mod_base = OTHER; note = 2'-O-methylcytidine
taaagcaaggaagaggccagatc

SEQ ID NO: 1074 - RNA, 23 nt, synthetic construct
  source 1..23: mol_type = other RNA
  modified_base 1: mod_base = OTHER; note = 2'-O-methyluridine-3'-phosphorothioate 5'-(E)-Vinylphosphonate
  modified_base 2: mod_base = OTHER; note = 2'-deoxy-2'-fluoroguanosine-3'-phosphorothioate
  modified_base 3: mod_base = OTHER; note = 2'-O-methyladenosine-3'-phosphate
  modified_base 4: mod_base = OTHER; note = 2'-O-methyladenosine-3'-phosphate
  modified_base 5: mod_base = OTHER; note = 2'-O-methyladenosine-3'-phosphate
  modified_base 6: mod_base = OTHER; note = 2'-O-methylguanosine-3'-phosphate
  modified_base 7: mod_base = OTHER; note = cytidine-2'-phosphate
  modified_base 8: mod_base = OTHER; note = 2'-O-methyladenosine-3'-phosphate
  modified_base 9: mod_base = OTHER; note = 2'-O-methyladenosine-3'-phosphate
  modified_base 10: mod_base = OTHER; note = 2'-O-methylguanosine-3'-phosphate
  modified_base 11: mod_base = OTHER; note = 2'-O-methylguanosine-3'-phosphate
  modified_base 12: mod_base = OTHER; note = 2'-O-methyladenosine-3'-phosphate
  modified_base 13: mod_base = OTHER; note = 2'-O-methyladenosine-3'-phosphate
  modified_base 14: mod_base = OTHER; note = 2'-deoxy-2'-fluoroguanosine-3'-phosphate
  modified_base 15: mod_base = OTHER; note = 2'-O-methyladenosine-3'-phosphate
  modified_base 16: mod_base = OTHER; note = 2'-deoxy-2'-fluoroguanosine-3'-phosphate
  modified_base 17: mod_base = OTHER; note = 2'-O-methylguanosine-3'-phosphate
  modified_base 18: mod_base = OTHER; note = 2'-O-methylcytidine-3'-phosphate
  modified_base 19: mod_base = OTHER; note = 2'-O-methylcytidine-3'-phosphate
  modified_base 20: mod_base = OTHER; note = 2'-O-methyladenosine-3'-phosphate
  modified_base 21: mod_base = OTHER; note = 2'-O-methylguanosine-3'-phosphorothioate
  modified_base 22: mod_base = OTHER; note = 2'-O-methyladenosine-3'-phosphorothioate
  modified_base 23: mod_base = OTHER; note = 2'-O-methyluridine
tgaaagcaaggaagaggccagat

SEQ ID NO: 1075 - RNA, 23 nt, synthetic construct
  source 1..23: mol_type = other RNA
  modified_base 1: mod_base = OTHER; note = 2'-O-methyluridine-3'-phosphorothioate 5'-(E)-Vinylphosphonate
  modified_base 2: mod_base = OTHER; note = 2'-deoxy-2'-fluoroguanosine-3'-phosphorothioate
  modified_base 3: mod_base = OTHER; note = 2'-O-methylguanosine-3'-phosphate
  modified_base 4: mod_base = OTHER; note = 2'-O-methyladenosine-3'-phosphate
  modified_base 5: mod_base = OTHER; note = 2'-O-methyladenosine-3'-phosphate
  modified_base 6: mod_base = OTHER; note = 2'-O-methyladenosine-3'-phosphate
  modified_base 7: mod_base = OTHER; note = guanosine-2'-phosphate
  modified_base 8: mod_base = OTHER; note = 2'-O-methylcytidine-3'-phosphate
  modified_base 9: mod_base = OTHER; note = 2'-O-methyladenosine-3'-phosphate
  modified_base 10: mod_base = OTHER; note = 2'-O-methyladenosine-3'-phosphate
  modified_base 11: mod_base = OTHER; note = 2'-O-methylguanosine-3'-phosphate
  modified_base 12: mod_base = OTHER; note = 2'-O-methylguanosine-3'-phosphate
  modified_base 13: mod_base = OTHER; note = 2'-O-methyladenosine-3'-phosphate
  modified_base 14: mod_base = OTHER; note = 2'-deoxy-2'-fluoroadenosine-3'-phosphate
  modified_base 15: mod_base = OTHER; note = 2'-O-methylguanosine-3'-phosphate
  modified_base 16: mod_base = OTHER; note = 2'-deoxy-2'-fluoroadenosine-3'-phosphate
  modified_base 17: mod_base = OTHER; note = 2'-O-methylguanosine-3'-phosphate
  modified_base 18: mod_base = OTHER; note = 2'-O-methylguanosine-3'-phosphate
  modified_base 19: mod_base = OTHER; note = 2'-O-methylcytidine-3'-phosphate
  modified_base 20: mod_base = OTHER; note = 2'-O-methylcytidine-3'-phosphate
  modified_base 21: mod_base = OTHER; note = 2'-O-methyladenosine-3'-phosphorothioate
  modified_base 22: mod_base = OTHER; note = 2'-O-methylguanosine-3'-phosphorothioate
  modified_base 23: mod_base = OTHER; note = 2'-O-methyladenosine
tggaaagcaaggaagaggccaga

SEQ ID NO: 1076 - RNA, 23 nt, synthetic construct
  source 1..23: mol_type = other RNA
  modified_base 1: mod_base = OTHER; note = 2'-O-methyluridine-3'-phosphorothioate 5'-(E)-Vinylphosphonate
  modified_base 2: mod_base = OTHER; note = 2'-deoxy-2'-fluoroguanosine-3'-phosphorothioate
  modified_base 3: mod_base = OTHER; note = 2'-O-methylguanosine-3'-phosphate
  modified_base 4: mod_base = OTHER; note = 2'-O-methylguanosine-3'-phosphate
  modified_base 5: mod_base = OTHER; note = 2'-O-methyladenosine-3'-phosphate
  modified_base 6: mod_base = OTHER; note = 2'-deoxy-2'-fluoroadenosine-3'-phosphate
  modified_base 7: mod_base = OTHER; note = 2'-O-methyladenosine-3'-phosphate
  modified_base 8: mod_base = OTHER; note = 2'-deoxy-2'-fluoroguanosine-3'-phosphate
  modified_base 9: mod_base = OTHER; note = 2'-deoxy-2'-fluorocytidine-3'-phosphate
  modified_base 10: mod_base = OTHER; note = 2'-O-methyladenosine-3'-phosphate
  modified_base 11: mod_base = OTHER; note = 2'-O-methyladenosine-3'-phosphate
  modified_base 12: mod_base = OTHER; note = 2'-O-methylguanosine-3'-phosphate
  modified_base 13: mod_base = OTHER; note = 2'-O-methylguanosine-3'-phosphate
  modified_base 14: mod_base = OTHER; note = 2'-deoxy-2'-fluoroadenosine-3'-phosphate
  modified_base 15: mod_base = OTHER; note = 2'-O-methyladenosine-3'-phosphate
  modified_base 16: mod_base = OTHER; note = 2'-deoxy-2'-fluoroguanosine-3'-phosphate
  modified_base 17: mod_base = OTHER; note = 2'-O-methyladenosine-3'-phosphate
  modified_base 18: mod_base = OTHER; note = 2'-O-methylguanosine-3'-phosphate
  modified_base 19: mod_base = OTHER; note = 2'-O-methylguanosine-3'-phosphate
  modified_base 20: mod_base = OTHER; note = 2'-O-methylcytidine-3'-phosphate
  modified_base 21: mod_base = OTHER; note = 2'-O-methylcytidine-3'-phosphorothioate
  modified_base 22: mod_base = OTHER; note = 2'-O-methyladenosine-3'-phosphorothioate
  modified_base 23: mod_base = OTHER; note = 2'-O-methylguanosine
tgggaaagcaaggaagaggccag

SEQ ID NO: 1077 - RNA, 23 nt, synthetic construct
  source 1..23: mol_type = other RNA
  modified_base 1: mod_base = OTHER; note = 2'-O-methyluridine-3'-phosphorothioate 5'-(E)-Vinylphosphonate
  modified_base 2: mod_base = OTHER; note = 2'-deoxy-2'-fluorocytidine-3'-phosphorothioate
  modified_base 3: mod_base = OTHER; note = 2'-O-methylguanosine-3'-phosphate
  modified_base 4: mod_base = OTHER; note = 2'-O-methylguanosine-3'-phosphate
  modified_base 5: mod_base = OTHER; note = 2'-O-methylguanosine-3'-phosphate
  modified_base 6: mod_base = OTHER; note = 2'-deoxy-2'-fluoroadenosine-3'-phosphate
  modified_base 7: mod_base = OTHER; note = 2'-O-methyladenosine-3'-phosphate
  modified_base 8: mod_base = OTHER; note = 2'-deoxy-2'-fluoroadenosine-3'-phosphate
  modified_base 9: mod_base = OTHER; note = 2'-deoxy-2'-fluoroguanosine-3'-phosphate
  modified_base 10: mod_base = OTHER; note = 2'-O-methylcytidine-3'-phosphate
  modified_base 11: mod_base = OTHER; note = 2'-O-methyladenosine-3'-phosphate
  modified_base 12: mod_base = OTHER; note = 2'-O-methyladenosine-3'-phosphate
  modified_base 13: mod_base = OTHER; note = 2'-O-methylguanosine-3'-phosphate
  modified_base 14: mod_base = OTHER; note = 2'-deoxy-2'-fluoroguanosine-3'-phosphate
  modified_base 15: mod_base = OTHER; note = 2'-O-methyladenosine-3'-phosphate
  modified_base 16: mod_base = OTHER; note = 2'-deoxy-2'-fluoroadenosine-3'-phosphate
  modified_base 17: mod_base = OTHER; note = 2'-O-methylguanosine-3'-phosphate
  modified_base 18: mod_base = OTHER; note = 2'-O-methyladenosine-3'-phosphate
  modified_base 19: mod_base = OTHER; note = 2'-O-methylguanosine-3'-phosphate
  modified_base 20: mod_base = OTHER; note = 2'-O-methylguanosine-3'-phosphate
  modified_base 21: mod_base = OTHER; note = 2'-O-methylcytidine-3'-phosphorothioate
  modified_base 22: mod_base = OTHER; note = 2'-O-methylcytidine-3'-phosphorothioate
  modified_base 23: mod_base = OTHER; note = 2'-O-methyladenosine
tcgggaaagcaaggaagaggcca

SEQ ID NO: 1078 - RNA, 23 nt, synthetic construct
  source 1..23: mol_type = other RNA
  modified_base 1: mod_base = OTHER; note = 2'-O-methyluridine-3'-phosphorothioate 5'-(E)-Vinylphosphonate
  modified_base 2: mod_base = OTHER; note = 2'-deoxy-2'-fluoroguanosine-3'-phosphorothioate
  modified_base 3: mod_base = OTHER; note = 2'-O-methyladenosine-3'-phosphate
  modified_base 4: mod_base = OTHER; note = 2'-O-methylguanosine-3'-phosphate
  modified_base 5: mod_base = OTHER; note = 2'-O-methylguanosine-3'-phosphate
  modified_base 6: mod_base = OTHER; note = 2'-O-methylguanosine-3'-phosphate
  modified_base 7: mod_base = OTHER; note = cytidine-2'-phosphate
  modified_base 8: mod_base = OTHER; note = 2'-O-methylguanosine-3'-phosphate
  modified_base 9: mod_base = OTHER; note = 2'-O-methylguanosine-3'-phosphate
  modified_base 10: mod_base = OTHER; note = 2'-O-methylguanosine-3'-phosphate
  modified_base 11: mod_base = OTHER; note = 2'-O-methyladenosine-3'-phosphate
  modified_base 12: mod_base = OTHER; note = 2'-O-methyladenosine-3'-phosphate
  modified_base 13: mod_base = OTHER; note = 2'-O-methyladenosine-3'-phosphate
  modified_base 14: mod_base = OTHER; note = 2'-deoxy-2'-fluoroguanosine-3'-phosphate
  modified_base 15: mod_base = OTHER; note = 2'-O-methylcytidine-3'-phosphate
  modified_base 16: mod_base = OTHER; note = 2'-deoxy-2'-fluoroadenosine-3'-phosphate
  modified_base 17: mod_base = OTHER; note = 2'-O-methyladenosine-3'-phosphate
  modified_base 18: mod_base = OTHER; note = 2'-O-methylguanosine-3'-phosphate
  modified_base 19: mod_base = OTHER; note = 2'-O-methylguanosine-3'-phosphate
  modified_base 20: mod_base = OTHER; note = 2'-O-methyladenosine-3'-phosphate
  modified_base 21: mod_base = OTHER; note = 2'-O-methyladenosine-3'-phosphorothioate
  modified_base 22: mod_base = OTHER; note = 2'-O-methylguanosine-3'-phosphorothioate
  modified_base 23: mod_base = OTHER; note = 2'-O-methyladenosine
tgagggcgggaaagcaaggaaga

SEQ ID NO: 1079 - RNA, 23 nt, synthetic construct
  source 1..23: mol_type = other RNA
  modified_base 1: mod_base = OTHER; note = 2'-O-methyluridine-3'-phosphorothioate 5'-(E)-Vinylphosphonate
  modified_base 2: mod_base = OTHER; note = 2'-deoxy-2'-fluorouridine-3'-phosphorothioate
  modified_base 3: mod_base = OTHER; note = 2'-O-methylguanosine-3'-phosphate
  modified_base 4: mod_base = OTHER; note = 2'-O-methyladenosine-3'-phosphate
  modified_base 5: mod_base = OTHER; note = 2'-O-methylguanosine-3'-phosphate
  modified_base 6: mod_base = OTHER; note = 2'-O-methylguanosine-3'-phosphate
  modified_base 7: mod_base = OTHER; note = guanosine-2'-phosphate
  modified_base 8: mod_base = OTHER; note = 2'-O-methylcytidine-3'-phosphate
  modified_base 9: mod_base = OTHER; note = 2'-O-methylguanosine-3'-phosphate
  modified_base 10: mod_base = OTHER; note = 2'-O-methylguanosine-3'-phosphate
  modified_base 11: mod_base = OTHER; note = 2'-O-methylguanosine-3'-phosphate
  modified_base 12: mod_base = OTHER; note = 2'-O-methyladenosine-3'-phosphate
  modified_base 13: mod_base = OTHER; note = 2'-O-methyladenosine-3'-phosphate
  modified_base 14: mod_base = OTHER; note = 2'-deoxy-2'-fluoroadenosine-3'-phosphate
  modified_base 15: mod_base = OTHER; note = 2'-O-methylguanosine-3'-phosphate
  modified_base 16: mod_base = OTHER; note = 2'-deoxy-2'-fluorocytidine-3'-phosphate
  modified_base 17: mod_base = OTHER; note = 2'-O-methyladenosine-3'-phosphate
  modified_base 18: mod_base = OTHER; note = 2'-O-methyladenosine-3'-phosphate
  modified_base 19: mod_base = OTHER; note = 2'-O-methylguanosine-3'-phosphate
  modified_base 20: mod_base = OTHER; note = 2'-O-methylguanosine-3'-phosphate
  modified_base 21: mod_base = OTHER; note = 2'-O-methyladenosine-3'-phosphorothioate
  modified_base 22: mod_base = OTHER; note = 2'-O-methyladenosine-3'-phosphorothioate
  modified_base 23: mod_base = OTHER; note = 2'-O-methylguanosine
ttgagggcgggaaagcaaggaag

SEQ ID NO: 1080 - RNA, 23 nt, synthetic construct
  source 1..23: mol_type = other RNA
  modified_base 1: mod_base = OTHER; note = 2'-O-methyluridine-3'-phosphorothioate 5'-(E)-Vinylphosphonate
  modified_base 2: mod_base = OTHER; note = 2'-deoxy-2'-fluorocytidine-3'-phosphorothioate
  modified_base 3: mod_base = OTHER; note = 2'-O-methyluridine-3'-phosphate
  modified_base 4: mod_base = OTHER; note = 2'-O-methylguanosine-3'-phosphate
  modified_base 5: mod_base = OTHER; note = 2'-O-methyladenosine-3'-phosphate
  modified_base 6: mod_base = OTHER; note = 2'-O-methylguanosine-3'-phosphate
  modified_base 7: mod_base = OTHER; note = guanosine-2'-phosphate
  modified_base 8: mod_base = OTHER; note = 2'-O-methylguanosine-3'-phosphate
  modified_base 9: mod_base = OTHER; note = 2'-O-methylcytidine-3'-phosphate
  modified_base 10: mod_base = OTHER; note = 2'-O-methylguanosine-3'-phosphate
  modified_base 11: mod_base = OTHER; note = 2'-O-methylguanosine-3'-phosphate
  modified_base 12: mod_base = OTHER; note = 2'-O-methylguanosine-3'-phosphate
  modified_base 13: mod_base = OTHER; note = 2'-O-methyladenosine-3'-phosphate
  modified_base 14: mod_base = OTHER; note = 2'-deoxy-2'-fluoroadenosine-3'-phosphate
  modified_base 15: mod_base = OTHER; note = 2'-O-methyladenosine-3'-phosphate
  modified_base 16: mod_base = OTHER; note = 2'-deoxy-2'-fluoroguanosine-3'-phosphate
  modified_base 17: mod_base = OTHER; note = 2'-O-methylcytidine-3'-phosphate
  modified_base 18: mod_base = OTHER; note = 2'-O-methyladenosine-3'-phosphate
  modified_base 19: mod_base = OTHER; note = 2'-O-methyladenosine-3'-phosphate
  modified_base 20: mod_base = OTHER; note = 2'-O-methylguanosine-3'-phosphate
  modified_base 21: mod_base = OTHER; note = 2'-O-methylguanosine-3'-phosphorothioate
  modified_base 22: mod_base = OTHER; note = 2'-O-methyladenosine-3'-phosphorothioate
  modified_base 23: mod_base = OTHER; note = 2'-O-methyladenosine
tctgagggcgggaaagcaaggaa

SEQ ID NO: 1081 - RNA, 23 nt, synthetic construct
  source 1..23: mol_type = other RNA
  modified_base 1: mod_base = OTHER; note = 2'-O-methyluridine-3'-phosphorothioate 5'-(E)-Vinylphosphonate
  modified_base 2: mod_base = OTHER; note = 2'-deoxy-2'-fluoroadenosine-3'-phosphorothioate
  modified_base 3: mod_base = OTHER; note = 2'-O-methylcytidine-3'-phosphate
  modified_base 4: mod_base = OTHER; note = 2'-O-methyluridine-3'-phosphate
  modified_base 5: mod_base = OTHER; note = 2'-O-methylguanosine-3'-phosphate
  modified_base 6: mod_base = OTHER; note = 2'-O-methyladenosine-3'-phosphate
  modified_base 7: mod_base = OTHER; note = guanosine-2'-phosphate
  modified_base 8: mod_base = OTHER; note = 2'-O-methylguanosine-3'-phosphate
  modified_base 9: mod_base = OTHER; note = 2'-O-methylguanosine-3'-phosphate
  modified_base 10: mod_base = OTHER; note = 2'-O-methylcytidine-3'-phosphate
  modified_base 11: mod_base = OTHER; note = 2'-O-methylguanosine-3'-phosphate
  modified_base 12: mod_base = OTHER; note = 2'-O-methylguanosine-3'-phosphate
  modified_base 13: mod_base = OTHER; note = 2'-O-methylguanosine-3'-phosphate
  modified_base 14: mod_base = OTHER; note = 2'-deoxy-2'-fluoroadenosine-3'-phosphate
  modified_base 15: mod_base = OTHER; note = 2'-O-methyladenosine-3'-phosphate
  modified_base 16: mod_base = OTHER; note = 2'-deoxy-2'-fluoroadenosine-3'-phosphate
  modified_base 17: mod_base = OTHER; note = 2'-O-methylguanosine-3'-phosphate
  modified_base 18: mod_base = OTHER; note = 2'-O-methylcytidine-3'-phosphate
  modified_base 19: mod_base = OTHER; note = 2'-O-methyladenosine-3'-phosphate
  modified_base 20: mod_base = OTHER; note = 2'-O-methyladenosine-3'-phosphate
  modified_base 21: mod_base = OTHER; note = 2'-O-methylguanosine-3'-phosphorothioate
  modified_base 22: mod_base = OTHER; note = 2'-O-methylguanosine-3'-phosphorothioate
  modified_base 23: mod_base = OTHER; note = 2'-O-methyladenosine
tactgagggcgggaaagcaagga

SEQ ID NO: 1082 - RNA, 23 nt, synthetic construct
  source 1..23: mol_type = other RNA
  modified_base 1: mod_base = OTHER; note = 2'-O-methyluridine-3'-phosphorothioate 5'-(E)-Vinylphosphonate
  modified_base 2: mod_base = OTHER; note = 2'-deoxy-2'-fluoroadenosine-3'-phosphorothioate
  modified_base 3: mod_base = OTHER; note = 2'-O-methyladenosine-3'-phosphate
  modified_base 4: mod_base = OTHER; note = 2'-O-methylguanosine-3'-phosphate
  modified_base 5: mod_base = OTHER; note = 2'-O-methylguanosine-3'-phosphate
  modified_base 6: mod_base = OTHER; note = 2'-O-methyladenosine-3'-phosphate
  modified_base 7: mod_base = OTHER; note = guanosine-2'-phosphate
  modified_base 8: mod_base = OTHER; note = 2'-O-methyladenosine-3'-phosphate
  modified_base 9: mod_base = OTHER; note = 2'-O-methylcytidine-3'-phosphate
  modified_base 10: mod_base = OTHER; note = 2'-O-methyladenosine-3'-phosphate
  modified_base 11: mod_base = OTHER; note = 2'-O-methylguanosine-3'-phosphate
  modified_base 12: mod_base = OTHER; note = 2'-O-methylcytidine-3'-phosphate
  modified_base 13: mod_base = OTHER; note = 2'-O-methyluridine-3'-phosphate
  modified_base 14: mod_base = OTHER; note = 2'-deoxy-2'-fluorocytidine-3'-phosphate
  modified_base 15: mod_base = OTHER; note = 2'-O-methylguanosine-3'-phosphate
  modified_base 16: mod_base = OTHER; note = 2'-deoxy-2'-fluoroguanosine-3'-phosphate
  modified_base 17: mod_base = OTHER; note = 2'-O-methylguanosine-3'-phosphate
  modified_base 18: mod_base = OTHER; note = 2'-O-methyluridine-3'-phosphate
  modified_base 19: mod_base = OTHER; note = 2'-O-methyladenosine-3'-phosphate
  modified_base 20: mod_base = OTHER; note = 2'-O-methylcytidine-3'-phosphate
  modified_base 21: mod_base = OTHER; note = 2'-O-methyluridine-3'-phosphorothioate
  modified_base 22: mod_base = OTHER; note = 2'-O-methylguanosine-3'-phosphorothioate
  modified_base 23: mod_base = OTHER; note = 2'-O-methyladenosine
taaggagacagctcgggtactga

SEQ ID NO: 1083 - RNA, 23 nt, synthetic construct
  source 1..23: mol_type = other RNA
  modified_base 1: mod_base = OTHER; note = 2'-O-methyluridine-3'-phosphorothioate 5'-(E)-Vinylphosphonate
  modified_base 2: mod_base = OTHER; note = 2'-deoxy-2'-fluoroguanosine-3'-phosphorothioate
  modified_base 3: mod_base = OTHER; note = 2'-O-methylguanosine-3'-phosphate
  modified_base 4: mod_base = OTHER; note = 2'-O-methyladenosine-3'-phosphate
  modified_base 5: mod_base = OTHER; note = 2'-O-methyladenosine-3'-phosphate
  modified_base 6: mod_base = OTHER; note = 2'-O-methylguanosine-3'-phosphate
  modified_base 7: mod_base = OTHER; note = guanosine-2'-phosphate
  modified_base 8: mod_base = OTHER; note = 2'-O-methyladenosine-3'-phosphate
  modified_base 9: mod_base = OTHER; note = 2'-O-methylguanosine-3'-phosphate
  modified_base 10: mod_base = OTHER; note = 2'-O-methyladenosine-3'-phosphate
  modified_base 11: mod_base = OTHER; note = 2'-O-methylcytidine-3'-phosphate
  modified_base 12: mod_base = OTHER; note = 2'-O-methyladenosine-3'-phosphate
  modified_base 13: mod_base = OTHER; note = 2'-O-methylguanosine-3'-phosphate
  modified_base 14: mod_base = OTHER; note = 2'-deoxy-2'-fluorocytidine-3'-phosphate
  modified_base 15: mod_base = OTHER; note = 2'-O-methyluridine-3'-phosphate
  modified_base 16: mod_base = OTHER; note = 2'-deoxy-2'-fluorocytidine-3'-phosphate
  modified_base 17: mod_base = OTHER; note = 2'-O-methylguanosine-3'-phosphate
  modified_base 18: mod_base = OTHER; note = 2'-O-methylguanosine-3'-phosphate
  modified_base 19: mod_base = OTHER; note = 2'-O-methylguanosine-3'-phosphate
  modified_base 20: mod_base = OTHER; note = 2'-O-methyluridine-3'-phosphate
  modified_base 21: mod_base = OTHER; note = 2'-O-methyladenosine-3'-phosphorothioate
  modified_base 22: mod_base = OTHER; note = 2'-O-methylcytidine-3'-phosphorothioate
  modified_base 23: mod_base = OTHER; note = 2'-O-methyluridine
tggaaggagacagctcgggtact

SEQ ID NO: 1084 - RNA, 23 nt, synthetic construct
  source 1..23: mol_type = other RNA
  modified_base 1: mod_base = OTHER; note = 2'-O-methyluridine-3'-phosphorothioate 5'-(E)-Vinylphosphonate
  modified_base 2: mod_base = OTHER; note = 2'-deoxy-2'-fluorouridine-3'-phosphorothioate
  modified_base 3: mod_base = OTHER; note = 2'-O-methylcytidine-3'-phosphate
  modified_base 4: mod_base = OTHER; note = 2'-O-methyladenosine-3'-phosphate
  modified_base 5: mod_base = OTHER; note = 2'-O-methyluridine-3'-phosphate
  modified_base 6: mod_base = OTHER; note = 2'-O-methylcytidine-3'-phosphate
  modified_base 7: mod_base = OTHER; note = cytidine-2'-phosphate
  modified_base 8: mod_base = OTHER; note = 2'-O-methylcytidine-3'-phosphate
  modified_base 9: mod_base = OTHER; note = 2'-O-methylguanosine-3'-phosphate
  modified_base 10: mod_base = OTHER; note = 2'-O-methylcytidine-3'-phosphate
  modified_base 11: mod_base = OTHER; note = 2'-O-methyladenosine-3'-phosphate
  modified_base 12: mod_base = OTHER; note = 2'-O-methyluridine-3'-phosphate
  modified_base 13: mod_base = OTHER; note = 2'-O-methylguanosine-3'-phosphate
  modified_base 14: mod_base = OTHER; note = 2'-deoxy-2'-fluoroadenosine-3'-phosphate
  modified_base 15: mod_base = OTHER; note = 2'-O-methyluridine-3'-phosphate
  modified_base 16: mod_base = OTHER; note = 2'-deoxy-2'-fluorocytidine-3'-phosphate
  modified_base 17: mod_base = OTHER; note = 2'-O-methyluridine-3'-phosphate
  modified_base 18: mod_base = OTHER; note = 2'-O-methylcytidine-3'-phosphate
  modified_base 19: mod_base = OTHER; note = 2'-O-methylcytidine-3'-phosphate
  modified_base 20: mod_base = OTHER; note = 2'-O-methyluridine-3'-phosphate
  modified_base 21: mod_base = OTHER; note = 2'-O-methylcytidine-3'-phosphorothioate
  modified_base 22: mod_base = OTHER; note = 2'-O-methylguanosine-3'-phosphorothioate
  modified_base 23: mod_base = OTHER; note = 2'-O-methylcytidine
ttcatcccgcatgatctcctcgc

SEQ ID NO: 1085 - RNA, 23 nt, synthetic construct
  source 1..23: mol_type = other RNA
  modified_base 1: mod_base = OTHER; note = 2'-O-methyluridine-3'-phosphorothioate 5'-(E)-Vinylphosphonate
  modified_base 2: mod_base = OTHER; note = 2'-deoxy-2'-fluorocytidine-3'-phosphorothioate
  modified_base 3: mod_base = OTHER; note = 2'-O-methyluridine-3'-phosphate
  modified_base 4: mod_base = OTHER; note = 2'-O-methylguanosine-3'-phosphate
  modified_base 5: mod_base = OTHER; note = 2'-O-methyladenosine-3'-phosphate
  modified_base 6: mod_base = OTHER; note = 2'-deoxy-2'-fluoroadenosine-3'-phosphate
  modified_base 7: mod_base = OTHER; note = 2'-O-methyladenosine-3'-phosphate
  modified_base 8: mod_base = OTHER; note = 2'-deoxy-2'-fluorouridine-3'-phosphate
  modified_base 9: mod_base = OTHER; note = 2'-deoxy-2'-fluorouridine-3'-phosphate
  modified_base 10: mod_base = OTHER; note = 2'-O-methylguanosine-3'-phosphate
  modified_base 11: mod_base = OTHER; note = 2'-O-methyluridine-3'-phosphate
  modified_base 12: mod_base = OTHER; note = 2'-O-methylguanosine-3'-phosphate
  modified_base 13: mod_base = OTHER; note = 2'-O-methylcytidine-3'-phosphate
  modified_base 14: mod_base = OTHER; note = 2'-deoxy-2'-fluoroadenosine-3'-phosphate
  modified_base 15: mod_base = OTHER; note = 2'-O-methylguanosine-3'-phosphate
  modified_base 16: mod_base = OTHER; note = 2'-deoxy-2'-fluoroguanosine-3'-phosphate
  modified_base 17: mod_base = OTHER; note = 2'-O-methylcytidine-3'-phosphate
  modified_base 18: mod_base = OTHER; note = 2'-O-methylguanosine-3'-phosphate
  modified_base 19: mod_base = OTHER; note = 2'-O-methyluridine-3'-phosphate
  modified_base 20: mod_base = OTHER; note = 2'-O-methylcytidine-3'-phosphate
  modified_base 21: mod_base = OTHER; note = 2'-O-methyluridine-3'-phosphorothioate
  modified_base 22: mod_base = OTHER; note = 2'-O-methylcytidine-3'-phosphorothioate
  modified_base 23: mod_base = OTHER; note = 2'-O-methylcytidine
tctgaaattgtgcaggcgtctcc

SEQ ID NO: 1086 - RNA, 23 nt, synthetic construct
  source 1..23: mol_type = other RNA
  modified_base 1: mod_base = OTHER; note = 2'-O-methyluridine-3'-phosphorothioate 5'-(E)-Vinylphosphonate
  modified_base 2: mod_base = OTHER; note = 2'-deoxy-2'-fluoroguanosine-3'-phosphorothioate
  modified_base 3: mod_base = OTHER; note = 2'-O-methylcytidine-3'-phosphate
  modified_base 4: mod_base = OTHER; note = 2'-O-methyluridine-3'-phosphate
  modified_base 5: mod_base = OTHER; note = 2'-O-methylguanosine-3'-phosphate
  modified_base 6: mod_base = OTHER; note = 2'-deoxy-2'-fluoroadenosine-3'-phosphate
  modified_base 7: mod_base = OTHER; note = 2'-O-methyladenosine-3'-phosphate
  modified_base 8: mod_base = OTHER; note = 2'-deoxy-2'-fluoroadenosine-3'-phosphate
  modified_base 9: mod_base = OTHER; note = 2'-deoxy-2'-fluorouridine-3'-phosphate
  modified_base 10: mod_base = OTHER; note = 2'-O-methyluridine-3'-phosphate
  modified_base 11: mod_base = OTHER; note = 2'-O-methylguanosine-3'-phosphate
  modified_base 12: mod_base = OTHER; note = 2'-O-methyluridine-3'-phosphate
  modified_base 13: mod_base = OTHER; note = 2'-O-methylguanosine-3'-phosphate
  modified_base 14: mod_base = OTHER; note = 2'-deoxy-2'-fluorocytidine-3'-phosphate
  modified_base 15: mod_base = OTHER; note = 2'-O-methyladenosine-3'-phosphate
  modified_base 16: mod_base = OTHER; note = 2'-deoxy-2'-fluoroguanosine-3'-phosphate
  modified_base 17: mod_base = OTHER; note = 2'-O-methylguanosine-3'-phosphate
  modified_base 18: mod_base = OTHER; note = 2'-O-methylcytidine-3'-phosphate
  modified_base 19: mod_base = OTHER; note = 2'-O-methylguanosine-3'-phosphate
  modified_base 20: mod_base = OTHER; note = 2'-O-methyluridine-3'-phosphate
  modified_base 21: mod_base = OTHER; note = 2'-O-methylcytidine-3'-phosphorothioate
  modified_base 22: mod_base = OTHER; note = 2'-O-methyluridine-3'-phosphorothioate
  modified_base 23: mod_base = OTHER; note = 2'-O-methylcytidine
tgctgaaattgtgcaggcgtctc

SEQ ID NO: 1087 - RNA, 23 nt, synthetic construct
  source 1..23: mol_type = other RNA
  modified_base 1: mod_base = OTHER; note = 2'-O-methyluridine-3'-phosphorothioate 5'-(E)-Vinylphosphonate
  modified_base 2: mod_base = OTHER; note = 2'-deoxy-2'-fluoroguanosine-3'-phosphorothioate
  modified_base 3: mod_base = OTHER; note = 2'-O-methylguanosine-3'-phosphate
  modified_base 4: mod_base = OTHER; note = 2'-O-methylguanosine-3'-phosphate
  modified_base 5: mod_base = OTHER; note = 2'-O-methylcytidine-3'-phosphate
  modified_base 6: mod_base = OTHER; note = 2'-O-methyluridine-3'-phosphate
  modified_base 7: mod_base = OTHER; note = guanosine-2'-phosphate
  modified_base 8: mod_base = OTHER; note = 2'-O-methyladenosine-3'-phosphate
  modified_base 9: mod_base = OTHER; note = 2'-O-methyladenosine-3'-phosphate
  modified_base 10: mod_base = OTHER; note = 2'-O-methyladenosine-3'-phosphate
  modified_base 11: mod_base = OTHER; note = 2'-O-methyluridine-3'-phosphate
  modified_base 12: mod_base = OTHER; note = 2'-O-methyluridine-3'-phosphate
  modified_base 13: mod_base = OTHER; note = 2'-O-methylguanosine-3'-phosphate
  modified_base 14: mod_base = OTHER; note = 2'-deoxy-2'-fluorouridine-3'-phosphate
  modified_base 15: mod_base = OTHER; note = 2'-O-methylguanosine-3'-phosphate
  modified_base 16: mod_base = OTHER; note = 2'-deoxy-2'-fluorocytidine-3'-phosphate
  modified_base 17: mod_base = OTHER; note = 2'-O-methyladenosine-3'-phosphate
  modified_base 18: mod_base = OTHER; note = 2'-O-methylguanosine-3'-phosphate
  modified_base 19: mod_base = OTHER; note = 2'-O-methylguanosine-3'-phosphate
  modified_base 20: mod_base = OTHER; note = 2'-O-methylcytidine-3'-phosphate
  modified_base 21: mod_base = OTHER; note = 2'-O-methylguanosine-3'-phosphorothioate
  modified_base 22: mod_base = OTHER; note = 2'-O-methyluridine-3'-phosphorothioate
  modified_base 23: mod_base = OTHER; note = 2'-O-methylcytidine
tgggctgaaattgtgcaggcgtc

SEQ ID NO: 1088 - RNA, 23 nt, synthetic construct
  source 1..23: mol_type = other RNA
  modified_base 1: mod_base = OTHER; note = 2'-O-methyluridine-3'-phosphorothioate 5'-(E)-Vinylphosphonate
  modified_base 2: mod_base = OTHER; note = 2'-deoxy-2'-fluorouridine-3'-phosphorothioate
  modified_base 3: mod_base = OTHER; note = 2'-O-methyluridine-3'-phosphate
  modified_base 4: mod_base = OTHER; note = 2'-O-methylguanosine-3'-phosphate
  modified_base 5: mod_base = OTHER; note = 2'-O-methylguanosine-3'-phosphate
  modified_base 6: mod_base = OTHER; note = 2'-O-methylguanosine-3'-phosphate
  modified_base 7: mod_base = OTHER; note = cytidine-2'-phosphate
  modified_base 8: mod_base = OTHER; note = 2'-O-methyluridine-3'-phosphate
  modified_base 9: mod_base = OTHER; note = 2'-O-methylguanosine-3'-phosphate
  modified_base 10: mod_base = OTHER; note = 2'-O-methyladenosine-3'-phosphate
  modified_base 11: mod_base = OTHER; note = 2'-O-methyladenosine-3'-phosphate
  modified_base 12: mod_base = OTHER; note = 2'-O-methyladenosine-3'-phosphate
  modified_base 13: mod_base = OTHER; note = 2'-O-methyluridine-3'-phosphate
  modified_base 14: mod_base = OTHER; note = 2'-deoxy-2'-fluorouridine-3'-phosphate
  modified_base 15: mod_base = OTHER; note = 2'-O-methylguanosine-3'-phosphate
  modified_base 16: mod_base = OTHER; note = 2'-deoxy-2'-fluorouridine-3'-phosphate
  modified_base 17: mod_base = OTHER; note = 2'-O-methylguanosine-3'-phosphate
  modified_base 18: mod_base = OTHER; note = 2'-O-methylcytidine-3'-phosphate
  modified_base 19: mod_base = OTHER; note = 2'-O-methyladenosine-3'-phosphate
  modified_base 20: mod_base = OTHER; note = 2'-O-methylguanosine-3'-phosphate
  modified_base 21: mod_base = OTHER; note = 2'-O-methylguanosine-3'-phosphorothioate
  modified_base 22: mod_base = OTHER; note = 2'-O-methylcytidine-3'-phosphorothioate
  modified_base 23: mod_base = OTHER; note = 2'-O-methylguanosine
tttgggctgaaattgtgcaggcg

SEQ ID NO: 1089 - RNA, 23 nt, synthetic construct
  source 1..23: mol_type = other RNA
  modified_base 1: mod_base = OTHER; note = 2'-O-methyluridine-3'-phosphorothioate 5'-(E)-Vinylphosphonate
  modified_base 2: mod_base = OTHER; note = 2'-deoxy-2'-fluorocytidine-3'-phosphorothioate
  modified_base 3: mod_base = OTHER; note = 2'-O-methyluridine-3'-phosphate
  modified_base 4: mod_base = OTHER; note = 2'-O-methyluridine-3'-phosphate
  modified_base 5: mod_base = OTHER; note = 2'-O-methylguanosine-3'-phosphate
  modified_base 6: mod_base = OTHER; note = 2'-O-methylguanosine-3'-phosphate
  modified_base 7: mod_base = OTHER; note = guanosine-2'-phosphate
  modified_base 8: mod_base = OTHER; note = 2'-O-methylcytidine-3'-phosphate
  modified_base 9: mod_base = OTHER; note = 2'-O-methyluridine-3'-phosphate
  modified_base 10: mod_base = OTHER; note = 2'-O-methylguanosine-3'-phosphate
  modified_base 11: mod_base = OTHER; note = 2'-O-methyladenosine-3'-phosphate
  modified_base 12: mod_base = OTHER; note = 2'-O-methyladenosine-3'-phosphate
  modified_base 13: mod_base = OTHER; note = 2'-O-methyladenosine-3'-phosphate
  modified_base 14: mod_base = OTHER; note = 2'-deoxy-2'-fluorouridine-3'-phosphate
  modified_base 15: mod_base = OTHER; note = 2'-O-methyluridine-3'-phosphate
  modified_base 16: mod_base = OTHER; note = 2'-deoxy-2'-fluoroguanosine-3'-phosphate
  modified_base 17: mod_base = OTHER; note = 2'-O-methyluridine-3'-phosphate
  modified_base 18: mod_base = OTHER; note = 2'-O-methylguanosine-3'-phosphate
  modified_base 19: mod_base = OTHER; note = 2'-O-methylcytidine-3'-phosphate
  modified_base 20: mod_base = OTHER; note = 2'-O-methyladenosine-3'-phosphate
  modified_base 21: mod_base = OTHER; note = 2'-O-methylguanosine-3'-phosphorothioate
  modified_base 22: mod_base = OTHER; note = 2'-O-methylguanosine-3'-phosphorothioate
  modified_base 23: mod_base = OTHER; note = 2'-O-methylcytidine
tcttgggctgaaattgtgcaggc

SEQ ID NO: 1090 - RNA, 23 nt, synthetic construct
  source 1..23: mol_type = other RNA
  modified_base 1: mod_base = OTHER; note = 2'-O-methyluridine-3'-phosphorothioate 5'-(E)-Vinylphosphonate
  modified_base 2: mod_base = OTHER; note = 2'-deoxy-2'-fluoroguanosine-3'-phosphorothioate
  modified_base 3: mod_base = OTHER; note = 2'-O-methylcytidine-3'-phosphate
  modified_base 4: mod_base = OTHER; note = 2'-O-methyluridine-3'-phosphate
  modified_base 5: mod_base = OTHER; note = 2'-O-methyluridine-3'-phosphate
  modified_base 6: mod_base = OTHER; note = 2'-O-methylguanosine-3'-phosphate
  modified_base 7: mod_base = OTHER; note = guanosine-2'-phosphate
  modified_base 8: mod_base = OTHER; note = 2'-O-methylguanosine-3'-phosphate
  modified_base 9: mod_base = OTHER; note = 2'-O-methylcytidine-3'-phosphate
  modified_base 10: mod_base = OTHER; note = 2'-O-methyluridine-3'-phosphate
  modified_base 11: mod_base = OTHER; note = 2'-O-methylguanosine-3'-phosphate
  modified_base 12: mod_base = OTHER; note = 2'-O-methyladenosine-3'-phosphate
  modified_base 13: mod_base = OTHER; note = 2'-O-methyladenosine-3'-phosphate
  modified_base 14: mod_base = OTHER; note = 2'-deoxy-2'-fluoroadenosine-3'-phosphate
  modified_base 15: mod_base = OTHER; note = 2'-O-methyluridine-3'-phosphate
  modified_base 16: mod_base = OTHER; note = 2'-deoxy-2'-fluorouridine-3'-phosphate
  modified_base 17: mod_base = OTHER; note = 2'-O-methylguanosine-3'-phosphate
  modified_base 18: mod_base = OTHER; note = 2'-O-methyluridine-3'-phosphate
  modified_base 19: mod_base = OTHER; note = 2'-O-methylguanosine-3'-phosphate
  modified_base 20: mod_base = OTHER; note = 2'-O-methylcytidine-3'-phosphate
  modified_base 21: mod_base = OTHER; note = 2'-O-methyladenosine-3'-phosphorothioate
  modified_base 22: mod_base = OTHER; note = 2'-O-methylguanosine-3'-phosphorothioate
  modified_base 23: mod_base = OTHER; note = 2'-O-methylguanosine
tgcttgggctgaaattgtgcagg

SEQ ID NO: 1091 - RNA, 23 nt, synthetic construct
  source 1..23: mol_type = other RNA
  modified_base 1: mod_base = OTHER; note = 2'-O-methyluridine-3'-phosphorothioate 5'-(E)-Vinylphosphonate
  modified_base 2: mod_base = OTHER; note = 2'-deoxy-2'-fluoroadenosine-3'-phosphorothioate
  modified_base 3: mod_base = OTHER; note = 2'-O-methylguanosine-3'-phosphate
  modified_base 4: mod_base = OTHER; note = 2'-O-methyladenosine-3'-phosphate
  modified_base 5: mod_base = OTHER; note = 2'-O-methyladenosine-3'-phosphate
  modified_base 6: mod_base = OTHER; note = 2'-O-methylguanosine-3'-phosphate
  modified_base 7: mod_base = OTHER; note = cytidine-2'-phosphate
  modified_base 8: mod_base = OTHER; note = 2'-O-methyluridine-3'-phosphate
  modified_base 9: mod_base = OTHER; note = 2'-O-methyluridine-3'-phosphate
  modified_base 10: mod_base = OTHER; note = 2'-O-methylguanosine-3'-phosphate
  modified_base 11: mod_base = OTHER; note = 2'-O-methylguanosine-3'-phosphate
  modified_base 12: mod_base = OTHER; note = 2'-O-methylguanosine-3'-phosphate
  modified_base 13: mod_base = OTHER; note = 2'-O-methylcytidine-3'-phosphate
  modified_base 14: mod_base = OTHER; note = 2'-deoxy-2'-fluorouridine-3'-phosphate
  modified_base 15: mod_base = OTHER; note = 2'-O-methylguanosine-3'-phosphate
  modified_base 16: mod_base = OTHER; note = 2'-deoxy-2'-fluoroadenosine-3'-phosphate
  modified_base 17: mod_base = OTHER; note = 2'-O-methyladenosine-3'-phosphate
  modified_base 18: mod_base = OTHER; note = 2'-O-methyladenosine-3'-phosphate
  modified_base 19: mod_base = OTHER; note = 2'-O-methyluridine-3'-phosphate
  modified_base 20: mod_base = OTHER; note = 2'-O-methyluridine-3'-phosphate
  modified_base 21: mod_base = OTHER; note = 2'-O-methylguanosine-3'-phosphorothioate
  modified_base 22: mod_base = OTHER; note = 2'-O-methyluridine-3'-phosphorothioate
  modified_base 23: mod_base = OTHER; note = 2'-O-methylguanosine
tagaagcttgggctgaaattgtg

SEQ ID NO: 1092 - RNA, 23 nt, synthetic construct
  source 1..23: mol_type = other RNA
  modified_base 1: mod_base = OTHER; note = 2'-O-methyluridine-3'-phosphorothioate 5'-(E)-Vinylphosphonate
  modified_base 2: mod_base = OTHER; note = 2'-deoxy-2'-fluorouridine-3'-phosphorothioate
  modified_base 3: mod_base = OTHER; note = 2'-O-methyladenosine-3'-phosphate
  modified_base 4: mod_base = OTHER; note = 2'-O-methylguanosine-3'-phosphate
  modified_base 5: mod_base = OTHER; note = 2'-O-methyladenosine-3'-phosphate
  modified_base 6: mod_base = OTHER; note = 2'-O-methyladenosine-3'-phosphate
  modified_base 7: mod_base = OTHER; note = guanosine-2'-phosphate
  modified_base 8: mod_base = OTHER; note = 2'-O-methylcytidine-3'-phosphate
  modified_base 9: mod_base = OTHER; note = 2'-O-methyluridine-3'-phosphate
  modified_base 10: mod_base = OTHER; note = 2'-O-methyluridine-3'-phosphate
  modified_base 11: mod_base = OTHER; note = 2'-O-methylguanosine-3'-phosphate
  modified_base 12: mod_base = OTHER; note = 2'-O-methylguanosine-3'-phosphate
  modified_base 13: mod_base = OTHER; note = 2'-O-methylguanosine-3'-phosphate
  modified_base 14: mod_base = OTHER; note = 2'-deoxy-2'-fluorocytidine-3'-phosphate
  modified_base 15: mod_base = OTHER; note = 2'-O-methyluridine-3'-phosphate
  modified_base 16: mod_base = OTHER; note = 2'-deoxy-2'-fluoroguanosine-3'-phosphate
  modified_base 17: mod_base = OTHER; note = 2'-O-methyladenosine-3'-phosphate
  modified_base 18: mod_base = OTHER; note = 2'-O-methyladenosine-3'-phosphate
  modified_base 19: mod_base = OTHER; note = 2'-O-methyladenosine-3'-phosphate
  modified_base 20: mod_base = OTHER; note = 2'-O-methyluridine-3'-phosphate
  modified_base 21: mod_base = OTHER; note = 2'-O-methyluridine-3'-phosphorothioate
  modified_base 22: mod_base = OTHER; note = 2'-O-methylguanosine-3'-phosphorothioate
  modified_base 23: mod_base = OTHER; note = 2'-O-methyluridine
ttagaagcttgggctgaaattgt

SEQ ID NO: 1093 - RNA, 23 nt, synthetic construct
  source 1..23: mol_type = other RNA
  modified_base 1: mod_base = OTHER; note = 2'-O-methyluridine-3'-phosphorothioate 5'-(E)-Vinylphosphonate
  modified_base 2: mod_base = OTHER; note = 2'-deoxy-2'-fluorocytidine-3'-phosphorothioate
  modified_base 3: mod_base = OTHER; note = 2'-O-methyluridine-3'-phosphate
  modified_base 4: mod_base = OTHER; note = 2'-O-methylcytidine-3'-phosphate
  modified_base 5: mod_base = OTHER; note = 2'-O-methyluridine-3'-phosphate
  modified_base 6: mod_base = OTHER; note = 2'-O-methylcytidine-3'-phosphate
  modified_base 7: mod_base = OTHER; note = Thymidine-glycol nucleic acid (GNA), S-Isomer
  modified_base 8: mod_base = OTHER; note = 2'-O-methyladenosine-3'-phosphate
  modified_base 9: mod_base = OTHER; note = 2'-O-methylguanosine-3'-phosphate
  modified_base 10: mod_base = OTHER; note = 2'-O-methyladenosine-3'-phosphate
  modified_base 11: mod_base = OTHER; note = 2'-O-methyladenosine-3'-phosphate
  modified_base 12: mod_base = OTHER; note = 2'-O-methylguanosine-3'-phosphate
  modified_base 13: mod_base = OTHER; note = 2'-O-methylcytidine-3'-phosphate
  modified_base 14: mod_base = OTHER; note = 2'-deoxy-2'-fluorouridine-3'-phosphate
  modified_base 15: mod_base = OTHER; note = 2'-O-methyluridine-3'-phosphate
  modified_base 16: mod_base = OTHER; note = 2'-deoxy-2'-fluoroguanosine-3'-phosphate
  modified_base 17: mod_base = OTHER; note = 2'-O-methylguanosine-3'-phosphate
  modified_base 18: mod_base = OTHER; note = 2'-O-methylguanosine-3'-phosphate
  modified_base 19: mod_base = OTHER; note = 2'-O-methylcytidine-3'-phosphate
  modified_base 20: mod_base = OTHER; note = 2'-O-methyluridine-3'-phosphate
  modified_base 21: mod_base = OTHER; note = 2'-O-methylguanosine-3'-phosphorothioate
  modified_base 22: mod_base = OTHER; note = 2'-O-methyladenosine-3'-phosphorothioate
  modified_base 23: mod_base = OTHER; note = 2'-O-methyladenosine
tctctctagaagcttgggctgaa

SEQ ID NO: 1094 - RNA, 23 nt, synthetic construct
  source 1..23: mol_type = other RNA
  modified_base 1: mod_base = OTHER; note = 2'-O-methyluridine-3'-phosphorothioate 5'-(E)-Vinylphosphonate
  modified_base 2: mod_base = OTHER; note = 2'-deoxy-2'-fluoroadenosine-3'-phosphorothioate
  modified_base 3: mod_base = OTHER; note = 2'-O-methylcytidine-3'-phosphate
  modified_base 4: mod_base = OTHER; note = 2'-O-methyluridine-3'-phosphate
  modified_base 5: mod_base = OTHER; note = 2'-O-methylcytidine-3'-phosphate
  modified_base 6: mod_base = OTHER; note = 2'-O-methyluridine-3'-phosphate
  modified_base 7: mod_base = OTHER; note = cytidine-2'-phosphate
  modified_base 8: mod_base = OTHER; note = 2'-O-methyluridine-3'-phosphate
  modified_base 9: mod_base = OTHER; note = 2'-O-methyladenosine-3'-phosphate
  modified_base 10: mod_base = OTHER; note = 2'-O-methylguanosine-3'-phosphate
  modified_base 11: mod_base = OTHER; note = 2'-O-methyladenosine-3'-phosphate
  modified_base 12: mod_base = OTHER; note = 2'-O-methyladenosine-3'-phosphate
  modified_base 13: mod_base = OTHER; note = 2'-O-methylguanosine-3'-phosphate
  modified_base 14: mod_base = OTHER; note = 2'-deoxy-2'-fluorocytidine-3'-phosphate
  modified_base 15: mod_base = OTHER; note = 2'-O-methyluridine-3'-phosphate
  modified_base 16: mod_base = OTHER; note = 2'-deoxy-2'-fluorouridine-3'-phosphate
  modified_base 17: mod_base = OTHER; note = 2'-O-methylguanosine-3'-phosphate
  modified_base 18: mod_base = OTHER; note = 2'-O-methylguanosine-3'-phosphate
  modified_base 19: mod_base = OTHER; note = 2'-O-methylguanosine-3'-phosphate
  modified_base 20: mod_base = OTHER; note = 2'-O-methylcytidine-3'-phosphate
  modified_base 21: mod_base = OTHER; note = 2'-O-methyluridine-3'-phosphorothioate
  modified_base 22: mod_base = OTHER; note = 2'-O-methylguanosine-3'-phosphorothioate
  modified_base 23: mod_base = OTHER; note = 2'-O-methyladenosine
tactctctagaagcttgggctga

SEQ ID NO: 1095 - RNA, 23 nt, synthetic construct
  source 1..23: mol_type = other RNA
  modified_base 1: mod_base = OTHER; note = 2'-O-methyluridine-3'-phosphorothioate 5'-(E)-Vinylphosphonate
  modified_base 2: mod_base = OTHER; note = 2'-deoxy-2'-fluorocytidine-3'-phosphorothioate
  modified_base 3: mod_base = OTHER; note = 2'-O-methyladenosine-3'-phosphate
  modified_base 4: mod_base = OTHER; note = 2'-O-methylcytidine-3'-phosphate
  modified_base 5: mod_base = OTHER; note = 2'-O-methyluridine-3'-phosphate
  modified_base 6: mod_base = OTHER; note = 2'-O-methylcytidine-3'-phosphate
  modified_base 7: mod_base = OTHER; note = Thymidine-glycol nucleic acid (GNA), S-Isomer
  modified_base 8: mod_base = OTHER; note = 2'-O-methylcytidine-3'-phosphate
  modified_base 9: mod_base = OTHER; note = 2'-O-methyluridine-3'-phosphate
  modified_base 10: mod_base = OTHER; note = 2'-O-methyladenosine-3'-phosphate
  modified_base 11: mod_base = OTHER; note = 2'-O-methylguanosine-3'-phosphate
  modified_base 12: mod_base = OTHER; note = 2'-O-methyladenosine-3'-phosphate
  modified_base 13: mod_base = OTHER; note = 2'-O-methyladenosine-3'-phosphate
  modified_base 14: mod_base = OTHER; note = 2'-deoxy-2'-fluoroguanosine-3'-phosphate
  modified_base 15: mod_base = OTHER; note = 2'-O-methylcytidine-3'-phosphate
  modified_base 16: mod_base = OTHER; note = 2'-deoxy-2'-fluorouridine-3'-phosphate
  modified_base 17: mod_base = OTHER; note = 2'-O-methyluridine-3'-phosphate
  modified_base 18: mod_base = OTHER; note = 2'-O-methylguanosine-3'-phosphate
  modified_base 19: mod_base = OTHER; note = 2'-O-methylguanosine-3'-phosphate
  modified_base 20: mod_base = OTHER; note = 2'-O-methylguanosine-3'-phosphate
  modified_base 21: mod_base = OTHER; note = 2'-O-methylcytidine-3'-phosphorothioate
  modified_base 22: mod_base = OTHER; note = 2'-O-methyluridine-3'-phosphorothioate
  modified_base 23: mod_base = OTHER; note = 2'-O-methylguanosine
tcactctctagaagcttgggctg

SEQ ID NO: 1096 - RNA, 23 nt, synthetic construct
  source 1..23: mol_type = other RNA
  modified_base 1: mod_base = OTHER; note = 2'-O-methyluridine-3'-phosphorothioate 5'-(E)-Vinylphosphonate
  modified_base 2: mod_base = OTHER; note = 2'-deoxy-2'-fluorocytidine-3'-phosphorothioate
  modified_base 3: mod_base = OTHER; note = 2'-O-methylcytidine-3'-phosphate
  modified_base 4: mod_base = OTHER; note = 2'-O-methyladenosine-3'-phosphate
  modified_base 5: mod_base = OTHER; note = 2'-O-methylcytidine-3'-phosphate
  modified_base 6: mod_base = OTHER; note = 2'-deoxy-2'-fluorouridine-3'-phosphate
  modified_base 7: mod_base = OTHER; note = 2'-O-methylcytidine-3'-phosphate
  modified_base 8: mod_base = OTHER; note = 2'-deoxy-2'-fluorouridine-3'-phosphate
  modified_base 9: mod_base = OTHER; note = 2'-deoxy-2'-fluorocytidine-3'-phosphate
  modified_base 10: mod_base = OTHER; note = 2'-O-methyluridine-3'-phosphate
  modified_base 11: mod_base = OTHER; note = 2'-O-methyladenosine-3'-phosphate
  modified_base 12: mod_base = OTHER; note = 2'-O-methylguanosine-3'-phosphate
  modified_base 13: mod_base = OTHER; note = 2'-O-methyladenosine-3'-phosphate
  modified_base 14: mod_base = OTHER; note = 2'-deoxy-2'-fluoroadenosine-3'-phosphate
  modified_base 15: mod_base = OTHER; note = 2'-O-methylguanosine-3'-phosphate
  modified_base 16: mod_base = OTHER; note = 2'-deoxy-2'-fluorocytidine-3'-phosphate
  modified_base 17: mod_base = OTHER; note = 2'-O-methyluridine-3'-phosphate
  modified_base 18: mod_base = OTHER; note = 2'-O-methyluridine-3'-phosphate
  modified_base 19: mod_base = OTHER; note = 2'-O-methylguanosine-3'-phosphate
  modified_base 20: mod_base = OTHER; note = 2'-O-methylguanosine-3'-phosphate
  modified_base 21: mod_base = OTHER; note = 2'-O-methylguanosine-3'-phosphorothioate
  modified_base 22: mod_base = OTHER; note = 2'-O-methylcytidine-3'-phosphorothioate
  modified_base 23: mod_base = OTHER; note = 2'-O-methyluridine
tccactctctagaagcttgggct

SEQ ID NO: 1097 - RNA, 23 nt, synthetic construct
  source 1..23: mol_type = other RNA
  modified_base 1: mod_base = OTHER; note = 2'-O-methyluridine-3'-phosphorothioate 5'-(E)-Vinylphosphonate
  modified_base 2: mod_base = OTHER; note = 2'-deoxy-2'-fluoroadenosine-3'-phosphorothioate
  modified_base 3: mod_base = OTHER; note = 2'-O-methylcytidine-3'-phosphate
  modified_base 4: mod_base = OTHER; note = 2'-O-methylcytidine-3'-phosphate
  modified_base 5: mod_base = OTHER; note = 2'-O-methyladenosine-3'-phosphate
  modified_base 6: mod_base = OTHER; note = 2'-O-methylcytidine-3'-phosphate
  modified_base 7: mod_base = OTHER; note = Thymidine-glycol nucleic acid (GNA), S-Isomer
  modified_base 8: mod_base = OTHER; note = 2'-O-methylcytidine-3'-phosphate
  modified_base 9: mod_base = OTHER; note = 2'-O-methyluridine-3'-phosphate
  modified_base 10: mod_base = OTHER; note = 2'-O-methylcytidine-3'-phosphate
  modified_base 11: mod_base = OTHER; note = 2'-O-methyluridine-3'-phosphate
  modified_base 12: mod_base = OTHER; note = 2'-O-methyladenosine-3'-phosphate
  modified_base 13: mod_base = OTHER; note = 2'-O-methylguanosine-3'-phosphate
  modified_base 14: mod_base = OTHER; note = 2'-deoxy-2'-fluoroadenosine-3'-phosphate
  modified_base 15: mod_base = OTHER; note = 2'-O-methyladenosine-3'-phosphate
  modified_base 16: mod_base = OTHER; note = 2'-deoxy-2'-fluoroguanosine-3'-phosphate
  modified_base 17: mod_base = OTHER; note = 2'-O-methylcytidine-3'-phosphate
  modified_base 18: mod_base = OTHER; note = 2'-O-methyluridine-3'-phosphate
  modified_base 19: mod_base = OTHER; note = 2'-O-methyluridine-3'-phosphate
  modified_base 20: mod_base = OTHER; note = 2'-O-methylguanosine-3'-phosphate
  modified_base 21: mod_base = OTHER; note = 2'-O-methylguanosine-3'-phosphorothioate
  modified_base 22: mod_base = OTHER; note = 2'-O-methylguanosine-3'-phosphorothioate
  modified_base 23: mod_base = OTHER; note = 2'-O-methylcytidine
taccactctctagaagcttgggc

SEQ ID NO: 1098 - RNA, 23 nt, synthetic construct
  source 1..23: mol_type = other RNA
  modified_base 1: mod_base = OTHER; note = 2'-O-methyluridine-3'-phosphorothioate 5'-(E)-Vinylphosphonate
  modified_base 2: mod_base = OTHER; note = 2'-deoxy-2'-fluorocytidine-3'-phosphorothioate
  modified_base 3: mod_base = OTHER; note = 2'-O-methyladenosine-3'-phosphate
  modified_base 4: mod_base = OTHER; note = 2'-O-methylcytidine-3'-phosphate
  modified_base 5: mod_base = OTHER; note = 2'-O-methylcytidine-3'-phosphate
  modified_base 6: mod_base = OTHER; note = 2'-deoxy-2'-fluoroadenosine-3'-phosphate
  modified_base 7: mod_base = OTHER; note = 2'-O-methylcytidine-3'-phosphate
  modified_base 8: mod_base = OTHER; note = 2'-deoxy-2'-fluorouridine-3'-phosphate
  modified_base 9: mod_base = OTHER; note = 2'-deoxy-2'-fluorocytidine-3'-phosphate
  modified_base 10: mod_base = OTHER; note = 2'-O-methyluridine-3'-phosphate
  modified_base 11: mod_base = OTHER; note = 2'-O-methylcytidine-3'-phosphate
  modified_base 12: mod_base = OTHER; note = 2'-O-methyluridine-3'-phosphate
  modified_base 13: mod_base = OTHER; note = 2'-O-methyladenosine-3'-phosphate
  modified_base 14: mod_base = OTHER; note = 2'-deoxy-2'-fluoroguanosine-3'-phosphate
  modified_base 15: mod_base = OTHER; note = 2'-O-methyladenosine-3'-phosphate
  modified_base 16: mod_base = OTHER; note = 2'-deoxy-2'-fluoroadenosine-3'-phosphate
  modified_base 17: mod_base = OTHER; note = 2'-O-methylguanosine-3'-phosphate
  modified_base 18: mod_base = OTHER; note = 2'-O-methylcytidine-3'-phosphate
  modified_base 19: mod_base = OTHER; note = 2'-O-methyluridine-3'-phosphate
  modified_base 20: mod_base = OTHER; note = 2'-O-methyluridine-3'-phosphate
  modified_base 21: mod_base = OTHER; note = 2'-O-methylguanosine-3'-phosphorothioate
  modified_base 22: mod_base = OTHER; note = 2'-O-methylguanosine-3'-phosphorothioate
  modified_base 23: mod_base = OTHER; note = 2'-O-methylguanosine
tcaccactctctagaagcttggg

SEQ ID NO: 1099 - RNA, 23 nt, synthetic construct
  source 1..23: mol_type = other RNA
  modified_base 1: mod_base = OTHER; note = 2'-O-methyluridine-3'-phosphorothioate 5'-(E)-Vinylphosphonate
  modified_base 2: mod_base = OTHER; note = 2'-deoxy-2'-fluorouridine-3'-phosphorothioate
  modified_base 3: mod_base = OTHER; note = 2'-O-methylcytidine-3'-phosphate
  modified_base 4: mod_base = OTHER; note = 2'-O-methyladenosine-3'-phosphate
  modified_base 5: mod_base = OTHER; note = 2'-O-methylcytidine-3'-phosphate
  modified_base 6: mod_base = OTHER; note = 2'-O-methylcytidine-3'-phosphate
  modified_base 7: mod_base = OTHER; note = Adenosine-glycol nucleic acid (GNA), S-isomer
  modified_base 8: mod_base = OTHER; note = 2'-O-methylcytidine-3'-phosphate
  modified_base 9: mod_base = OTHER; note = 2'-O-methyluridine-3'-phosphate
  modified_base 10: mod_base = OTHER; note = 2'-O-methylcytidine-3'-phosphate
  modified_base 11: mod_base = OTHER; note = 2'-O-methyluridine-3'-phosphate
  modified_base 12: mod_base = OTHER; note = 2'-O-methylcytidine-3'-phosphate
  modified_base 13: mod_base = OTHER; note = 2'-O-methyluridine-3'-phosphate
  modified_base 14: mod_base = OTHER; note = 2'-deoxy-2'-fluoroadenosine-3'-phosphate
  modified_base 15: mod_base = OTHER; note = 2'-O-methylguanosine-3'-phosphate
  modified_base 16: mod_base = OTHER; note = 2'-deoxy-2'-fluoroadenosine-3'-phosphate
  modified_base 17: mod_base = OTHER; note = 2'-O-methyladenosine-3'-phosphate
  modified_base 18: mod_base = OTHER; note = 2'-O-methylguanosine-3'-phosphate
  modified_base 19: mod_base = OTHER; note = 2'-O-methylcytidine-3'-phosphate
  modified_base 20: mod_base = OTHER; note = 2'-O-methyluridine-3'-phosphate
  modified_base 21: mod_base = OTHER; note = 2'-O-methyluridine-3'-phosphorothioate
  modified_base 22: mod_base = OTHER; note = 2'-O-methylguanosine-3'-phosphorothioate
  modified_base 23: mod_base = OTHER; note = 2'-O-methylguanosine
ttcaccactctctagaagcttgg

SEQ ID NO: 1100 - RNA, 23 nt, synthetic construct
  source 1..23: mol_type = other RNA
  modified_base 1: mod_base = OTHER; note = 2'-O-methyluridine-3'-phosphorothioate 5'-(E)-Vinylphosphonate
  modified_base 2: mod_base = OTHER; note = 2'-deoxy-2'-fluoroadenosine-3'-phosphorothioate
  modified_base 3: mod_base = OTHER; note = 2'-O-methyluridine-3'-phosphate
  modified_base 4: mod_base = OTHER; note = 2'-O-methylcytidine-3'-phosphate
  modified_base 5: mod_base = OTHER; note = 2'-O-methyladenosine-3'-phosphate
  modified_base 6: mod_base = OTHER; note = 2'-O-methylcytidine-3'-phosphate
  modified_base 7: mod_base = OTHER; note = cytidine-2'-phosphate
  modified_base 8: mod_base = OTHER; note = 2'-O-methyladenosine-3'-phosphate
  modified_base 9: mod_base = OTHER; note = 2'-O-methylcytidine-3'-phosphate
  modified_base 10: mod_base = OTHER; note = 2'-O-methyluridine-3'-phosphate
  modified_base 11: mod_base = OTHER; note = 2'-O-methylcytidine-3'-phosphate
  modified_base 12: mod_base = OTHER; note = 2'-O-methyluridine-3'-phosphate
  modified_base 13: mod_base = OTHER; note = 2'-O-methylcytidine-3'-phosphate
  modified_base 14: mod_base = OTHER; note = 2'-deoxy-2'-fluorouridine-3'-phosphate
  modified_base 15: mod_base = OTHER; note = 2'-O-methyladenosine-3'-phosphate
  modified_base 16: mod_base = OTHER; note = 2'-deoxy-2'-fluoroguanosine-3'-phosphate
  modified_base 17: mod_base = OTHER; note = 2'-O-methyladenosine-3'-phosphate
  modified_base 18: mod_base = OTHER; note = 2'-O-methyladenosine-3'-phosphate
  modified_base 19: mod_base = OTHER; note = 2'-O-methylguanosine-3'-phosphate
  modified_base 20: mod_base = OTHER; note = 2'-O-methylcytidine-3'-phosphate
  modified_base 21: mod_base = OTHER; note = 2'-O-methyluridine-3'-phosphorothioate
  modified_base 22: mod_base = OTHER; note = 2'-O-methyluridine-3'-phosphorothioate
  modified_base 23: mod_base = OTHER; note = 2'-O-methylguanosine
tatcaccactctctagaagcttg

SEQ ID NO: 1101 - RNA, 23 nt, synthetic construct
  source 1..23: mol_type = other RNA
  modified_base 1: mod_base = OTHER; note = 2'-O-methyluridine-3'-phosphorothioate 5'-(E)-Vinylphosphonate
  modified_base 2: mod_base = OTHER; note = 2'-deoxy-2'-fluorocytidine-3'-phosphorothioate
  modified_base 3: mod_base = OTHER; note = 2'-O-methyladenosine-3'-phosphate
  modified_base 4: mod_base = OTHER; note = 2'-O-methyluridine-3'-phosphate
  modified_base 5: mod_base = OTHER; note = 2'-O-methylcytidine-3'-phosphate
  modified_base 6: mod_base = OTHER; note = 2'-O-methyladenosine-3'-phosphate
  modified_base 7: mod_base = OTHER; note = cytidine-2'-phosphate
  modified_base 8: mod_base = OTHER; note = 2'-O-methylcytidine-3'-phosphate
  modified_base 9: mod_base = OTHER; note = 2'-O-methyladenosine-3'-phosphate
  modified_base 10: mod_base = OTHER; note = 2'-O-methylcytidine-3'-phosphate
  modified_base 11: mod_base = OTHER; note = 2'-O-methyluridine-3'-phosphate
  modified_base 12: mod_base = OTHER; note = 2'-O-methylcytidine-3'-phosphate
  modified_base 13: mod_base = OTHER; note = 2'-O-methyluridine-3'-phosphate
  modified_base 14: mod_base = OTHER; note = 2'-deoxy-2'-fluorocytidine-3'-phosphate
  modified_base 15: mod_base = OTHER; note = 2'-O-methyluridine-3'-phosphate
  modified_base 16: mod_base = OTHER; note = 2'-deoxy-2'-fluoroadenosine-3'-phosphate
  modified_base 17: mod_base = OTHER; note = 2'-O-methylguanosine-3'-phosphate
  modified_base 18: mod_base = OTHER; note = 2'-O-methyladenosine-3'-phosphate
  modified_base 19: mod_base = OTHER; note = 2'-O-methyladenosine-3'-phosphate
  modified_base 20: mod_base = OTHER; note = 2'-O-methylguanosine-3'-phosphate
  modified_base 21: mod_base = OTHER; note = 2'-O-methylcytidine-3'-phosphorothioate
  modified_base 22: mod_base = OTHER; note = 2'-O-methyluridine-3'-phosphorothioate
  modified_base 23: mod_base = OTHER; note = 2'-O-methyluridine
tcatcaccactctctagaagctt

SEQ ID NO: 1102 - RNA, 23 nt, synthetic construct
  source 1..23: mol_type = other RNA
  modified_base 1: mod_base = OTHER; note = 2'-O-methyluridine-3'-phosphorothioate 5'-(E)-Vinylphosphonate
  modified_base 2: mod_base = OTHER; note = 2'-deoxy-2'-fluoroguanosine-3'-phosphorothioate
  modified_base 3: mod_base = OTHER; note = 2'-O-methyluridine-3'-phosphate
  modified_base 4: mod_base = OTHER; note = 2'-O-methylcytidine-3'-phosphate
  modified_base 5: mod_base = OTHER; note = 2'-O-methyladenosine-3'-phosphate
  modified_base 6: mod_base = OTHER; note = 2'-O-methyluridine-3'-phosphate
  modified_base 7: mod_base = OTHER; note = cytidine-2'-phosphate
  modified_base 8: mod_base = OTHER; note = 2'-O-methyladenosine-3'-phosphate
  modified_base 9: mod_base = OTHER; note = 2'-O-methylcytidine-3'-phosphate
  modified_base 10: mod_base = OTHER; note = 2'-O-methylcytidine-3'-phosphate
  modified_base 11: mod_base = OTHER; note = 2'-O-methyladenosine-3'-phosphate
  modified_base 12: mod_base = OTHER; note = 2'-O-methylcytidine-3'-phosphate
  modified_base 13: mod_base = OTHER; note = 2'-O-methyluridine-3'-phosphate
  modified_base 14: mod_base = OTHER; note = 2'-deoxy-2'-fluorocytidine-3'-phosphate
  modified_base 15: mod_base = OTHER; note = 2'-O-methyluridine-3'-phosphate
  modified_base 16: mod_base = OTHER; note = 2'-deoxy-2'-fluorocytidine-3'-phosphate
  modified_base 17: mod_base = OTHER; note = 2'-O-methyluridine-3'-phosphate
  modified_base 18: mod_base = OTHER; note = 2'-O-methyladenosine-3'-phosphate
  modified_base 19: mod_base = OTHER; note = 2'-O-methylguanosine-3'-phosphate
  modified_base 20: mod_base = OTHER; note = 2'-O-methyladenosine-3'-phosphate
  modified_base 21: mod_base = OTHER; note = 2'-O-methyladenosine-3'-phosphorothioate
  modified_base 22: mod_base = OTHER; note = 2'-O-methylguanosine-3'-phosphorothioate
  modified_base 23: mod_base = OTHER; note = 2'-O-methylcytidine
tgtcatcaccactctctagaagc

SEQ ID NO: 1103 - RNA, 23 nt, synthetic construct
  source 1..23: mol_type = other RNA
  modified_base 1: mod_base = OTHER; note = 2'-O-methyluridine-3'-phosphorothioate 5'-(E)-Vinylphosphonate
  modified_base 2: mod_base = OTHER; note = 2'-deoxy-2'-fluorocytidine-3'-phosphorothioate
  modified_base 3: mod_base = OTHER; note = 2'-O-methyladenosine-3'-phosphate
  modified_base 4: mod_base = OTHER; note = 2'-O-methyladenosine-3'-phosphate
  modified_base 5: mod_base = OTHER; note = 2'-O-methylguanosine-3'-phosphate
  modified_base 6: mod_base = OTHER; note = 2'-O-methyluridine-3'-phosphate
  modified_base 7: mod_base = OTHER; note = cytidine-2'-phosphate
  modified_base 8: mod_base = OTHER; note = 2'-O-methyladenosine-3'-phosphate
  modified_base 9: mod_base = OTHER; note = 2'-O-methyluridine-3'-phosphate
  modified_base 10: mod_base = OTHER; note = 2'-O-methylcytidine-3'-phosphate
  modified_base 11: mod_base = OTHER; note = 2'-O-methyladenosine-3'-phosphate
  modified_base 12: mod_base = OTHER; note = 2'-O-methylcytidine-3'-phosphate
  modified_base 13: mod_base = OTHER; note = 2'-O-methylcytidine-3'-phosphate
  modified_base 14: mod_base = OTHER; note = 2'-deoxy-2'-fluoroadenosine-3'-phosphate
  modified_base 15: mod_base = OTHER; note = 2'-O-methylcytidine-3'-phosphate
  modified_base 16: mod_base = OTHER; note = 2'-deoxy-2'-fluorouridine-3'-phosphate
  modified_base 17: mod_base = OTHER; note = 2'-O-methylcytidine-3'-phosphate
  modified_base 18: mod_base = OTHER; note = 2'-O-methyluridine-3'-phosphate
  modified_base 19: mod_base = OTHER; note = 2'-O-methylcytidine-3'-phosphate
  modified_base 20: mod_base = OTHER; note = 2'-O-methyluridine-3'-phosphate
  modified_base 21: mod_base = OTHER; note = 2'-O-methyladenosine-3'-phosphorothioate
  modified_base 22: mod_base = OTHER; note = 2'-O-methylguanosine-3'-phosphorothioate
  modified_base 23: mod_base = OTHER; note = 2'-O-methyladenosine
tcaagtcatcaccactctctaga

SEQ ID NO: 1104 - RNA, 23 nt, synthetic construct
  source 1..23: mol_type = other RNA
  modified_base 1: mod_base = OTHER; note = 2'-O-methyluridine-3'-phosphorothioate 5'-(E)-Vinylphosphonate
  modified_base 2: mod_base = OTHER; note = 2'-deoxy-2'-fluoroguanosine-3'-phosphorothioate
  modified_base 3: mod_base = OTHER; note = 2'-O-methylcytidine-3'-phosphate
  modified_base 4: mod_base = OTHER; note = 2'-O-methyladenosine-3'-phosphate
  modified_base 5: mod_base = OTHER; note = 2'-O-methyladenosine-3'-phosphate
  modified_base 6: mod_base = OTHER; note = 2'-O-methylguanosine-3'-phosphate
  modified_base 7: mod_base = OTHER; note = Thymidine-glycol nucleic acid (GNA), S-Isomer
  modified_base 8: mod_base = OTHER; note = 2'-O-methylcytidine-3'-phosphate
  modified_base 9: mod_base = OTHER; note = 2'-O-methyladenosine-3'-phosphate
  modified_base 10: mod_base = OTHER; note = 2'-O-methyluridine-3'-phosphate
  modified_base 11: mod_base = OTHER; note = 2'-O-methylcytidine-3'-phosphate
  modified_base 12: mod_base = OTHER; note = 2'-O-methyladenosine-3'-phosphate
  modified_base 13: mod_base = OTHER; note = 2'-O-methylcytidine-3'-phosphate
  modified_base 14: mod_base = OTHER; note = 2'-deoxy-2'-fluorocytidine-3'-phosphate
  modified_base 15: mod_base = OTHER; note = 2'-O-methyladenosine-3'-phosphate
  modified_base 16: mod_base = OTHER; note = 2'-deoxy-2'-fluorocytidine-3'-phosphate
  modified_base 17: mod_base = OTHER; note = 2'-O-methyluridine-3'-phosphate
  modified_base 18: mod_base = OTHER; note = 2'-O-methylcytidine-3'-phosphate
  modified_base 19: mod_base = OTHER; note = 2'-O-methyluridine-3'-phosphate
  modified_base 20: mod_base = OTHER; note = 2'-O-methylcytidine-3'-phosphate
  modified_base 21: mod_base = OTHER; note = 2'-O-methyluridine-3'-phosphorothioate
  modified_base 22: mod_base = OTHER; note = 2'-O-methyladenosine-3'-phosphorothioate
  modified_base 23: mod_base = OTHER; note = 2'-O-methylguanosine
tgcaagtcatcaccactctctag

SEQ ID NO: 1105 - RNA, 23 nt, synthetic construct
  source 1..23: mol_type = other RNA
  modified_base 1: mod_base = OTHER; note = 2'-O-methyluridine-3'-phosphorothioate 5'-(E)-Vinylphosphonate
  modified_base 2: mod_base = OTHER; note = 2'-deoxy-2'-fluorouridine-3'-phosphorothioate
  modified_base 3: mod_base = OTHER; note = 2'-O-methylguanosine-3'-phosphate
  modified_base 4: mod_base = OTHER; note = 2'-O-methylcytidine-3'-phosphate
  modified_base 5: mod_base = OTHER; note = 2'-O-methyladenosine-3'-phosphate
  modified_base 6: mod_base = OTHER; note = 2'-O-methyladenosine-3'-phosphate
  modified_base 7: mod_base = OTHER; note = guanosine-2'-phosphate
  modified_base 8: mod_base = OTHER; note = 2'-O-methyluridine-3'-phosphate
  modified_base 9: mod_base = OTHER; note = 2'-O-methylcytidine-3'-phosphate
  modified_base 10: mod_base = OTHER; note = 2'-O-methyladenosine-3'-phosphate
  modified_base 11: mod_base = OTHER; note = 2'-O-methyluridine-3'-phosphate
  modified_base 12: mod_base = OTHER; note = 2'-O-methylcytidine-3'-phosphate
  modified_base 13: mod_base = OTHER; note = 2'-O-methyladenosine-3'-phosphate
  modified_base 14: mod_base = OTHER; note = 2'-deoxy-2'-fluorocytidine-3'-phosphate
  modified_base 15: mod_base = OTHER; note = 2'-O-methylcytidine-3'-phosphate
  modified_base 16: mod_base = OTHER; note = 2'-deoxy-2'-fluoroadenosine-3'-phosphate
  modified_base 17: mod_base = OTHER; note = 2'-O-methylcytidine-3'-phosphate
  modified_base 18: mod_base = OTHER; note = 2'-O-methyluridine-3'-phosphate
  modified_base 19: mod_base = OTHER; note = 2'-O-methylcytidine-3'-phosphate
  modified_base 20: mod_base = OTHER; note = 2'-O-methyluridine-3'-phosphate
  modified_base 21: mod_base = OTHER; note = 2'-O-methylcytidine-3'-phosphorothioate
  modified_base 22: mod_base = OTHER; note = 2'-O-methyluridine-3'-phosphorothioate
  modified_base 23: mod_base = OTHER; note = 2'-O-methyladenosine
ttgcaagtcatcaccactctcta

SEQ ID NO: 1106 - RNA, 23 nt, synthetic construct
  source 1..23: mol_type = other RNA
  modified_base 1: mod_base = OTHER; note = 2'-O-methyluridine-3'-phosphorothioate 5'-(E)-Vinylphosphonate
  modified_base 2: mod_base = OTHER; note = 2'-deoxy-2'-fluoroadenosine-3'-phosphorothioate
  modified_base 3: mod_base = OTHER; note = 2'-O-methyluridine-3'-phosphate
  modified_base 4: mod_base = OTHER; note = 2'-O-methyladenosine-3'-phosphate
  modified_base 5: mod_base = OTHER; note = 2'-O-methyluridine-3'-phosphate
  modified_base 6: mod_base = OTHER; note = 2'-O-methylguanosine-3'-phosphate
  modified_base 7: mod_base = OTHER; note = cytidine-2'-phosphate
  modified_base 8: mod_base = OTHER; note = 2'-O-methyladenosine-3'-phosphate
  modified_base 9: mod_base = OTHER; note = 2'-O-methyladenosine-3'-phosphate
  modified_base 10: mod_base = OTHER; note = 2'-O-methylguanosine-3'-phosphate
  modified_base 11: mod_base = OTHER; note = 2'-O-methyluridine-3'-phosphate
  modified_base 12: mod_base = OTHER; note = 2'-O-methylcytidine-3'-phosphate
  modified_base 13: mod_base = OTHER; note = 2'-O-methyladenosine-3'-phosphate
  modified_base 14: mod_base = OTHER; note = 2'-deoxy-2'-fluorouridine-3'-phosphate
  modified_base 15: mod_base = OTHER; note = 2'-O-methylcytidine-3'-phosphate
  modified_base 16: mod_base = OTHER; note = 2'-deoxy-2'-fluoroadenosine-3'-phosphate
  modified_base 17: mod_base = OTHER; note = 2'-O-methylcytidine-3'-phosphate
  modified_base 18: mod_base = OTHER; note = 2'-O-methylcytidine-3'-phosphate
  modified_base 19: mod_base = OTHER; note = 2'-O-methyladenosine-3'-phosphate
  modified_base 20: mod_base = OTHER; note = 2'-O-methylcytidine-3'-phosphate
  modified_base 21: mod_base = OTHER; note = 2'-O-methyluridine-3'-phosphorothioate
  modified_base 22: mod_base = OTHER; note = 2'-O-methylcytidine-3'-phosphorothioate
  modified_base 23: mod_base = OTHER; note = 2'-O-methyluridine
tatatgcaagtcatcaccactct

SEQ ID NO: 1107 - RNA, 23 nt, synthetic construct
  source 1..23: mol_type = other RNA
  modified_base 1: mod_base = OTHER; note = 2'-O-methyluridine-3'-phosphorothioate 5'-(E)-Vinylphosphonate
  modified_base 2: mod_base = OTHER; note = 2'-deoxy-2'-fluorocytidine-3'-phosphorothioate
  modified_base 3: mod_base = OTHER; note = 2'-O-methyluridine-3'-phosphate
  modified_base 4: mod_base = OTHER; note = 2'-O-methylcytidine-3'-phosphate
  modified_base 5: mod_base = OTHER; note = 2'-O-methyladenosine-3'-phosphate
  modified_base 6: mod_base = OTHER; note = 2'-deoxy-2'-fluorouridine-3'-phosphate
  modified_base 7: mod_base = OTHER; note = 2'-O-methyladenosine-3'-phosphate
  modified_base 8: mod_base = OTHER; note = 2'-deoxy-2'-fluorouridine-3'-phosphate
  modified_base 9: mod_base = OTHER; note = 2'-deoxy-2'-fluoroguanosine-3'-phosphate
  modified_base 10: mod_base = OTHER; note = 2'-O-methylcytidine-3'-phosphate
  modified_base 11: mod_base = OTHER; note = 2'-O-methyladenosine-3'-phosphate
  modified_base 12: mod_base = OTHER; note = 2'-O-methyladenosine-3'-phosphate
  modified_base 13: mod_base = OTHER; note = 2'-O-methylguanosine-3'-phosphate
  modified_base 14: mod_base = OTHER; note = 2'-deoxy-2'-fluorouridine-3'-phosphate
  modified_base 15: mod_base = OTHER; note = 2'-O-methylcytidine-3'-phosphate
  modified_base 16: mod_base = OTHER; note = 2'-deoxy-2'-fluoroadenosine-3'-phosphate
  modified_base 17: mod_base = OTHER; note = 2'-O-methyluridine-3'-phosphate
  modified_base 18: mod_base = OTHER; note = 2'-O-methylcytidine-3'-phosphate
  modified_base 19: mod_base = OTHER; note = 2'-O-methyladenosine-3'-phosphate
  modified_base 20: mod_base = OTHER; note = 2'-O-methylcytidine-3'-phosphate
  modified_base 21: mod_base = OTHER; note = 2'-O-methylcytidine-3'-phosphorothioate
  modified_base 22: mod_base = OTHER; note = 2'-O-methyladenosine-3'-phosphorothioate
  modified_base 23: mod_base = OTHER; note = 2'-O-methylcytidine
tctcatatgcaagtcatcaccac

SEQ ID NO: 1108 - RNA, 23 nt, synthetic construct
  source 1..23: mol_type = other RNA
  modified_base 1: mod_base = OTHER; note = 2'-O-methyluridine-3'-phosphorothioate 5'-(E)-Vinylphosphonate
  modified_base 2: mod_base = OTHER; note = 2'-deoxy-2'-fluorocytidine-3'-phosphorothioate
  modified_base 3: mod_base = OTHER; note = 2'-O-methylcytidine-3'-phosphate
  modified_base 4: mod_base = OTHER; note = 2'-O-methyluridine-3'-phosphate
  modified_base 5: mod_base = OTHER; note = 2'-O-methylcytidine-3'-phosphate
  modified_base 6: mod_base = OTHER; note = 2'-deoxy-2'-fluoroadenosine-3'-phosphate
  modified_base 7: mod_base = OTHER; note = 2'-O-methyluridine-3'-phosphate
  modified_base 8: mod_base = OTHER; note = 2'-deoxy-2'-fluoroadenosine-3'-phosphate
  modified_base 9: mod_base = OTHER; note = 2'-deoxy-2'-fluorouridine-3'-phosphate
  modified_base 10: mod_base = OTHER; note = 2'-O-methylguanosine-3'-phosphate
  modified_base 11: mod_base = OTHER; note = 2'-O-methylcytidine-3'-phosphate
  modified_base 12: mod_base = OTHER; note = 2'-O-methyladenosine-3'-phosphate
  modified_base 13: mod_base = OTHER; note = 2'-O-methyladenosine-3'-phosphate
  modified_base 14: mod_base = OTHER; note = 2'-deoxy-2'-fluoroguanosine-3'-phosphate
  modified_base 15: mod_base = OTHER; note = 2'-O-methyluridine-3'-phosphate
  modified_base 16: mod_base = OTHER; note = 2'-deoxy-2'-fluorocytidine-3'-phosphate
  modified_base 17: mod_base = OTHER; note = 2'-O-methyladenosine-3'-phosphate
  modified_base 18: mod_base = OTHER; note = 2'-O-methyluridine-3'-phosphate
  modified_base 19: mod_base = OTHER; note = 2'-O-methylcytidine-3'-phosphate
  modified_base 20: mod_base = OTHER; note = 2'-O-methyladenosine-3'-phosphate
  modified_base 21: mod_base = OTHER; note = 2'-O-methylcytidine-3'-phosphorothioate
  modified_base 22: mod_base = OTHER; note = 2'-O-methylcytidine-3'-phosphorothioate
  modified_base 23: mod_base = OTHER; note = 2'-O-methyladenosine
tcctcatatgcaagtcatcacca

SEQ ID NO: 1109 - RNA, 23 nt, synthetic construct
  source 1..23: mol_type = other RNA
  modified_base 1: mod_base = OTHER; note = 2'-O-methyluridine-3'-phosphorothioate 5'-(E)-Vinylphosphonate
  modified_base 2: mod_base = OTHER; note = 2'-deoxy-2'-fluorocytidine-3'-phosphorothioate
  modified_base 3: mod_base = OTHER; note = 2'-O-methylcytidine-3'-phosphate
  modified_base 4: mod_base = OTHER; note = 2'-O-methylcytidine-3'-phosphate
  modified_base 5: mod_base = OTHER; note = 2'-O-methyluridine-3'-phosphate
  modified_base 6: mod_base = OTHER; note = 2'-deoxy-2'-fluorocytidine-3'-phosphate
  modified_base 7: mod_base = OTHER; note = 2'-O-methyladenosine-3'-phosphate
  modified_base 8: mod_base = OTHER; note = 2'-deoxy-2'-fluorouridine-3'-phosphate
  modified_base 9: mod_base = OTHER; note = 2'-deoxy-2'-fluoroadenosine-3'-phosphate
  modified_base 10: mod_base = OTHER; note = 2'-O-methyluridine-3'-phosphate
  modified_base 11: mod_base = OTHER; note = 2'-O-methylguanosine-3'-phosphate
  modified_base 12: mod_base = OTHER; note = 2'-O-methylcytidine-3'-phosphate
  modified_base 13: mod_base = OTHER; note = 2'-O-methyladenosine-3'-phosphate
  modified_base 14: mod_base = OTHER; note = 2'-deoxy-2'-fluoroadenosine-3'-phosphate
  modified_base 15: mod_base = OTHER; note = 2'-O-methylguanosine-3'-phosphate
  modified_base 16: mod_base = OTHER; note = 2'-deoxy-2'-fluorouridine-3'-phosphate
  modified_base 17: mod_base = OTHER; note = 2'-O-methylcytidine-3'-phosphate
  modified_base 18: mod_base = OTHER; note = 2'-O-methyladenosine-3'-phosphate
  modified_base 19: mod_base = OTHER; note = 2'-O-methyluridine-3'-phosphate
  modified_base 20: mod_base = OTHER; note = 2'-O-methylcytidine-3'-phosphate
  modified_base 21: mod_base = OTHER; note = 2'-O-methyladenosine-3'-phosphorothioate
  modified_base 22: mod_base = OTHER; note = 2'-O-methylcytidine-3'-phosphorothioate
  modified_base 23: mod_base = OTHER; note = 2'-O-methylcytidine
tccctcatatgcaagtcatcacc

SEQ ID NO: 1110 - RNA, 23 nt, synthetic construct
  source 1..23: mol_type = other RNA
  modified_base 1: mod_base = OTHER; note = 2'-O-methyluridine-3'-phosphorothioate 5'-(E)-Vinylphosphonate
  modified_base 2: mod_base = OTHER; note = 2'-deoxy-2'-fluorocytidine-3'-phosphorothioate
  modified_base 3: mod_base = OTHER; note = 2'-O-methylcytidine-3'-phosphate
  modified_base 4: mod_base = OTHER; note = 2'-O-methylguanosine-3'-phosphate
  modified_base 5: mod_base = OTHER; note = 2'-O-methyladenosine-3'-phosphate
  modified_base 6: mod_base = OTHER; note = 2'-deoxy-2'-fluorocytidine-3'-phosphate
  modified_base 7: mod_base = OTHER; note = 2'-O-methyluridine-3'-phosphate
  modified_base 8: mod_base = OTHER; note = 2'-deoxy-2'-fluorouridine-3'-phosphate
  modified_base 9: mod_base = OTHER; note = 2'-deoxy-2'-fluoroguanosine-3'-phosphate
  modified_base 10: mod_base = OTHER; note = 2'-O-methylcytidine-3'-phosphate
  modified_base 11: mod_base = OTHER; note = 2'-O-methyladenosine-3'-phosphate
  modified_base 12: mod_base = OTHER; note = 2'-O-methyluridine-3'-phosphate
  modified_base 13: mod_base = OTHER; note = 2'-O-methyluridine-3'-phosphate
  modified_base 14: mod_base = OTHER; note = 2'-deoxy-2'-fluoroguanosine-3'-phosphate
  modified_base 15: mod_base = OTHER; note = 2'-O-methylcytidine-3'-phosphate
  modified_base 16: mod_base = OTHER; note = 2'-deoxy-2'-fluorouridine-3'-phosphate
  modified_base 17: mod_base = OTHER; note = 2'-O-methylguanosine-3'-phosphate
  modified_base 18: mod_base = OTHER; note = 2'-O-methylcytidine-3'-phosphate
  modified_base 19: mod_base = OTHER; note = 2'-O-methylcytidine-3'-phosphate
  modified_base 20: mod_base = OTHER; note = 2'-O-methylcytidine-3'-phosphate
  modified_base 21: mod_base = OTHER; note = 2'-O-methyluridine-3'-phosphorothioate
  modified_base 22: mod_base = OTHER; note = 2'-O-methylcytidine-3'-phosphorothioate
  modified_base 23: mod_base = OTHER; note = 2'-O-methyladenosine
tccgacttgcattgctgccctca

SEQ ID NO: 1111 - RNA, 23 nt, synthetic construct
  source 1..23: mol_type = other RNA
  modified_base 1: mod_base = OTHER; note = 2'-O-methyluridine-3'-phosphorothioate 5'-(E)-Vinylphosphonate
  modified_base 2: mod_base = OTHER; note = 2'-deoxy-2'-fluoroadenosine-3'-phosphorothioate
  modified_base 3: mod_base = OTHER; note = 2'-O-methylcytidine-3'-phosphate
  modified_base 4: mod_base = OTHER; note = 2'-O-methylcytidine-3'-phosphate
  modified_base 5: mod_base = OTHER; note = 2'-O-methylguanosine-3'-phosphate
  modified_base 6: mod_base = OTHER; note = 2'-deoxy-2'-fluoroadenosine-3'-phosphate
  modified_base 7: mod_base = OTHER; note = 2'-O-methylcytidine-3'-phosphate
  modified_base 8: mod_base = OTHER; note = 2'-deoxy-2'-fluorouridine-3'-phosphate
  modified_base 9: mod_base = OTHER; note = 2'-deoxy-2'-fluorouridine-3'-phosphate
  modified_base 10: mod_base = OTHER; note = 2'-O-methylguanosine-3'-phosphate
  modified_base 11: mod_base = OTHER; note = 2'-O-methylcytidine-3'-phosphate
  modified_base 12: mod_base = OTHER; note = 2'-O-methyladenosine-3'-phosphate
  modified_base 13: mod_base = OTHER; note = 2'-O-methyluridine-3'-phosphate
  modified_base 14: mod_base = OTHER; note = 2'-deoxy-2'-fluorouridine-3'-phosphate
  modified_base 15: mod_base = OTHER; note = 2'-O-methylguanosine-3'-phosphate
  modified_base 16: mod_base = OTHER; note = 2'-deoxy-2'-fluorocytidine-3'-phosphate
  modified_base 17: mod_base = OTHER; note = 2'-O-methyluridine-3'-phosphate
  modified_base 18: mod_base = OTHER; note = 2'-O-methylguanosine-3'-phosphate
  modified_base 19: mod_base = OTHER; note = 2'-O-methylcytidine-3'-phosphate
  modified_base 20: mod_base = OTHER; note = 2'-O-methylcytidine-3'-phosphate
  modified_base 21: mod_base = OTHER; note = 2'-O-methylcytidine-3'-phosphorothioate
  modified_base 22: mod_base = OTHER; note = 2'-O-methyluridine-3'-phosphorothioate
  modified_base 23: mod_base = OTHER; note = 2'-O-methylcytidine
taccgacttgcattgctgccctc

SEQ ID NO: 1112 - RNA, 23 nt, synthetic construct
  source 1..23: mol_type = other RNA
  modified_base 1: mod_base = OTHER; note = 2'-O-methyluridine-3'-phosphorothioate 5'-(E)-Vinylphosphonate
  modified_base 2: mod_base = OTHER; note = 2'-deoxy-2'-fluorocytidine-3'-phosphorothioate
  modified_base 3: mod_base = OTHER; note = 2'-O-methyladenosine-3'-phosphate
  modified_base 4: mod_base = OTHER; note = 2'-O-methylcytidine-3'-phosphate
  modified_base 5: mod_base = OTHER; note = 2'-O-methylcytidine-3'-phosphate
  modified_base 6: mod_base = OTHER; note = 2'-deoxy-2'-fluoroguanosine-3'-phosphate
  modified_base 7: mod_base = OTHER; note = 2'-O-methyladenosine-3'-phosphate
  modified_base 8: mod_base = OTHER; note = 2'-deoxy-2'-fluorocytidine-3'-phosphate
  modified_base 9: mod_base = OTHER; note = 2'-deoxy-2'-fluorouridine-3'-phosphate
  modified_base 10: mod_base = OTHER; note = 2'-O-methyluridine-3'-phosphate
  modified_base 11: mod_base = OTHER; note = 2'-O-methylguanosine-3'-phosphate
  modified_base 12: mod_base = OTHER; note = 2'-O-methylcytidine-3'-phosphate
  modified_base 13: mod_base = OTHER; note = 2'-O-methyladenosine-3'-phosphate
  modified_base 14: mod_base = OTHER; note = 2'-deoxy-2'-fluorouridine-3'-phosphate
  modified_base 15: mod_base = OTHER; note = 2'-O-methyluridine-3'-phosphate
  modified_base 16: mod_base = OTHER; note = 2'-deoxy-2'-fluoroguanosine-3'-phosphate
  modified_base 17: mod_base = OTHER; note = 2'-O-methylcytidine-3'-phosphate
  modified_base 18: mod_base = OTHER; note = 2'-O-methyluridine-3'-phosphate
  modified_base 19: mod_base = OTHER; note = 2'-O-methylguanosine-3'-phosphate
  modified_base 20: mod_base = OTHER; note = 2'-O-methylcytidine-3'-phosphate
  modified_base 21: mod_base = OTHER; note = 2'-O-methylcytidine-3'-phosphorothioate
  modified_base 22: mod_base = OTHER; note = 2'-O-methylcytidine-3'-phosphorothioate
  modified_base 23: mod_base = OTHER; note = 2'-O-methyluridine
tcaccgacttgcattgctgccct

SEQ ID NO: 1113 - RNA, 23 nt, synthetic construct
  source 1..23: mol_type = other RNA
  modified_base 1: mod_base = OTHER; note = 2'-O-methyluridine-3'-phosphorothioate 5'-(E)-Vinylphosphonate
  modified_base 2: mod_base = OTHER; note = 2'-deoxy-2'-fluoroadenosine-3'-phosphorothioate
  modified_base 3: mod_base = OTHER; note = 2'-O-methylcytidine-3'-phosphate
  modified_base 4: mod_base = OTHER; note = 2'-O-methyladenosine-3'-phosphate
  modified_base 5: mod_base = OTHER; note = 2'-O-methylcytidine-3'-phosphate
  modified_base 6: mod_base = OTHER; note = 2'-deoxy-2'-fluorocytidine-3'-phosphate
  modified_base 7: mod_base = OTHER; note = 2'-O-methylguanosine-3'-phosphate
  modified_base 8: mod_base = OTHER; note = 2'-deoxy-2'-fluoroadenosine-3'-phosphate
  modified_base 9: mod_base = OTHER; note = 2'-deoxy-2'-fluorocytidine-3'-phosphate
  modified_base 10: mod_base = OTHER; note = 2'-O-methyluridine-3'-phosphate
  modified_base 11: mod_base = OTHER; note = 2'-O-methyluridine-3'-phosphate
  modified_base 12: mod_base = OTHER; note = 2'-O-methylguanosine-3'-phosphate
  modified_base 13: mod_base = OTHER; note = 2'-O-methylcytidine-3'-phosphate
  modified_base 14: mod_base = OTHER; note = 2'-deoxy-2'-fluoroadenosine-3'-phosphate
  modified_base 15: mod_base = OTHER; note = 2'-O-methyluridine-3'-phosphate
  modified_base 16: mod_base = OTHER; note = 2'-deoxy-2'-fluorouridine-3'-phosphate
  modified_base 17: mod_base = OTHER; note = 2'-O-methylguanosine-3'-phosphate
  modified_base 18: mod_base = OTHER; note = 2'-O-methylcytidine-3'-phosphate
  modified_base 19: mod_base = OTHER; note = 2'-O-methyluridine-3'-phosphate
  modified_base 20: mod_base = OTHER; note = 2'-O-methylguanosine-3'-phosphate
  modified_base 21: mod_base = OTHER; note = 2'-O-methylcytidine-3'-phosphorothioate
  modified_base 22: mod_base = OTHER; note = 2'-O-methylcytidine-3'-phosphorothioate
  modified_base 23: mod_base = OTHER; note = 2'-O-methylcytidine
tacaccgacttgcattgctgccc

SEQ ID NO: 1114 - RNA, 23 nt, synthetic construct
  source 1..23: mol_type = other RNA
  modified_base 1: mod_base = OTHER; note = 2'-O-methyluridine-3'-phosphorothioate 5'-(E)-Vinylphosphonate
  modified_base 2: mod_base = OTHER; note = 2'-deoxy-2'-fluorocytidine-3'-phosphorothioate
  modified_base 3: mod_base = OTHER; note = 2'-O-methyladenosine-3'-phosphate
  modified_base 4: mod_base = OTHER; note = 2'-O-methylcytidine-3'-phosphate
  modified_base 5: mod_base = OTHER; note = 2'-O-methyladenosine-3'-phosphate
  modified_base 6: mod_base = OTHER; note = 2'-deoxy-2'-fluorocytidine-3'-phosphate
  modified_base 7: mod_base = OTHER; note = 2'-O-methylcytidine-3'-phosphate
  modified_base 8: mod_base = OTHER; note = 2'-deoxy-2'-fluoroguanosine-3'-phosphate
  modified_base 9: mod_base = OTHER; note = 2'-deoxy-2'-fluoroadenosine-3'-phosphate
  modified_base 10: mod_base = OTHER; note = 2'-O-methylcytidine-3'-phosphate
  modified_base 11: mod_base = OTHER; note = 2'-O-methyluridine-3'-phosphate
  modified_base 12: mod_base = OTHER; note = 2'-O-methyluridine-3'-phosphate
  modified_base 13: mod_base = OTHER; note = 2'-O-methylguanosine-3'-phosphate
  modified_base 14: mod_base = OTHER; note = 2'-deoxy-2'-fluorocytidine-3'-phosphate
  modified_base 15: mod_base = OTHER; note = 2'-O-methyladenosine-3'-phosphate
  modified_base 16: mod_base = OTHER; note = 2'-deoxy-2'-fluorouridine-3'-phosphate
  modified_base 17: mod_base = OTHER; note = 2'-O-methyluridine-3'-phosphate
  modified_base 18: mod_base = OTHER; note = 2'-O-methylguanosine-3'-phosphate
  modified_base 19: mod_base = OTHER; note = 2'-O-methylcytidine-3'-phosphate
  modified_base 20: mod_base = OTHER; note = 2'-O-methyluridine-3'-phosphate
  modified_base 21: mod_base = OTHER; note = 2'-O-methylguanosine-3'-phosphorothioate
  modified_base 22: mod_base = OTHER; note = 2'-O-methylcytidine-3'-phosphorothioate
  modified_base 23: mod_base = OTHER; note = 2'-O-methylcytidine
tcacaccgacttgcattgctgcc

SEQ ID NO: 1115 - RNA, 23 nt, synthetic construct
  source 1..23: mol_type = other RNA
  modified_base 1: mod_base = OTHER; note = 2'-O-methyluridine-3'-phosphorothioate 5'-(E)-Vinylphosphonate
  modified_base 2: mod_base = OTHER; note = 2'-deoxy-2'-fluoroguanosine-3'-phosphorothioate
  modified_base 3: mod_base = OTHER; note = 2'-O-methyladenosine-3'-phosphate
  modified_base 4: mod_base = OTHER; note = 2'-O-methylguanosine-3'-phosphate
  modified_base 5: mod_base = OTHER; note = 2'-O-methylcytidine-3'-phosphate
  modified_base 6: mod_base = OTHER; note = 2'-O-methyladenosine-3'-phosphate
  modified_base 7: mod_base = OTHER; note = cytidine-2'-phosphate
  modified_base 8: mod_base = OTHER; note = 2'-O-methyladenosine-3'-phosphate
  modified_base 9: mod_base = OTHER; note = 2'-O-methylcytidine-3'-phosphate
  modified_base 10: mod_base = OTHER; note = 2'-O-methylcytidine-3'-phosphate
  modified_base 11: mod_base = OTHER; note = 2'-O-methylguanosine-3'-phosphate
  modified_base 12: mod_base = OTHER; note = 2'-O-methyladenosine-3'-phosphate
  modified_base 13: mod_base = OTHER; note = 2'-O-methylcytidine-3'-phosphate
  modified_base 14: mod_base = OTHER; note = 2'-deoxy-2'-fluorouridine-3'-phosphate
  modified_base 15: mod_base = OTHER; note = 2'-O-methyluridine-3'-phosphate
  modified_base 16: mod_base = OTHER; note = 2'-deoxy-2'-fluoroguanosine-3'-phosphate
  modified_base 17: mod_base = OTHER; note = 2'-O-methylcytidine-3'-phosphate
  modified_base 18: mod_base = OTHER; note = 2'-O-methyladenosine-3'-phosphate
  modified_base 19: mod_base = OTHER; note = 2'-O-methyluridine-3'-phosphate
  modified_base 20: mod_base = OTHER; note = 2'-O-methyluridine-3'-phosphate
  modified_base 21: mod_base = OTHER; note = 2'-O-methylguanosine-3'-phosphorothioate
  modified_base 22: mod_base = OTHER; note = 2'-O-methylcytidine-3'-phosphorothioate
  modified_base 23: mod_base = OTHER; note = 2'-O-methyluridine
tgagcacaccgacttgcattgct

SEQ ID NO: 1116 - RNA, 23 nt, synthetic construct
  source 1..23: mol_type = other RNA
  modified_base 1: mod_base = OTHER; note = 2'-O-methyluridine-3'-phosphorothioate 5'-(E)-Vinylphosphonate
  modified_base 2: mod_base = OTHER; note = 2'-deoxy-2'-fluoroadenosine-3'-phosphorothioate
  modified_base 3: mod_base = OTHER; note = 2'-O-methyladenosine-3'-phosphate
  modified_base 4: mod_base = OTHER; note = 2'-O-methylcytidine-3'-phosphate
  modified_base 5: mod_base = OTHER; note = 2'-O-methylcytidine-3'-phosphate
  modified_base 6: mod_base = OTHER; note = 2'-O-methyladenosine-3'-phosphate
  modified_base 7: mod_base = OTHER; note = guanosine-2'-phosphate
  modified_base 8: mod_base = OTHER; note = 2'-O-methylguanosine-3'-phosphate
  modified_base 9: mod_base = OTHER; note = 2'-O-methyluridine-3'-phosphate
  modified_base 10: mod_base = OTHER; note = 2'-O-methylcytidine-3'-phosphate
  modified_base 11: mod_base = OTHER; note = 2'-O-methyladenosine-3'-phosphate
  modified_base 12: mod_base = OTHER; note = 2'-O-methyluridine-3'-phosphate
  modified_base 13: mod_base = OTHER; note = 2'-O-methylguanosine-3'-phosphate
  modified_base 14: mod_base = OTHER; note = 2'-deoxy-2'-fluorouridine-3'-phosphate
  modified_base 15: mod_base = OTHER; note = 2'-O-methylcytidine-3'-phosphate
  modified_base 16: mod_base = OTHER; note = 2'-deoxy-2'-fluorocytidine-3'-phosphate
  modified_base 17: mod_base = OTHER; note = 2'-O-methylcytidine-3'-phosphate
  modified_base 18: mod_base = OTHER; note = 2'-O-methyladenosine-3'-phosphate
  modified_base 19: mod_base = OTHER; note = 2'-O-methylcytidine-3'-phosphate
  modified_base 20: mod_base = OTHER; note = 2'-O-methyladenosine-3'-phosphate
  modified_base 21: mod_base = OTHER; note = 2'-O-methylguanosine-3'-phosphorothioate
  modified_base 22: mod_base = OTHER; note = 2'-O-methyladenosine-3'-phosphorothioate
  modified_base 23: mod_base = OTHER; note = 2'-O-methyladenosine
taaccaggtcatgtcccacagaa

SEQ ID NO: 1117 - RNA, 23 nt, synthetic construct
  source 1..23: mol_type = other RNA
  modified_base 1: mod_base = OTHER; note = 2'-O-methyluridine-3'-phosphorothioate 5'-(E)-Vinylphosphonate
  modified_base 2: mod_base = OTHER; note = 2'-deoxy-2'-fluorocytidine-3'-phosphorothioate
  modified_base 3: mod_base = OTHER; note = 2'-O-methyladenosine-3'-phosphate
  modified_base 4: mod_base = OTHER; note = 2'-O-methyladenosine-3'-phosphate
  modified_base 5: mod_base = OTHER; note = 2'-O-methylcytidine-3'-phosphate
  modified_base 6: mod_base = OTHER; note = 2'-deoxy-2'-fluorocytidine-3'-phosphate
  modified_base 7: mod_base = OTHER; note = 2'-O-methyladenosine-3'-phosphate
  modified_base 8: mod_base = OTHER; note = 2'-deoxy-2'-fluoroguanosine-3'-phosphate
  modified_base 9: mod_base = OTHER; note = 2'-deoxy-2'-fluoroguanosine-3'-phosphate
  modified_base 10: mod_base = OTHER; note = 2'-O-methyluridine-3'-phosphate
  modified_base 11: mod_base = OTHER; note = 2'-O-methylcytidine-3'-phosphate
  modified_base 12: mod_base = OTHER; note = 2'-O-methyladenosine-3'-phosphate
  modified_base 13: mod_base = OTHER; note = 2'-O-methyluridine-3'-phosphate
  modified_base 14: mod_base = OTHER; note = 2'-deoxy-2'-fluoroguanosine-3'-phosphate
  modified_base 15: mod_base = OTHER; note = 2'-O-methyluridine-3'-phosphate
  modified_base 16: mod_base = OTHER; note = 2'-deoxy-2'-fluorocytidine-3'-phosphate
  modified_base 17: mod_base = OTHER; note = 2'-O-methylcytidine-3'-phosphate
  modified_base 18: mod_base = OTHER; note = 2'-O-methylcytidine-3'-phosphate
  modified_base 19: mod_base = OTHER; note = 2'-O-methyladenosine-3'-phosphate
  modified_base 20: mod_base = OTHER; note = 2'-O-methylcytidine-3'-phosphate
  modified_base 21: mod_base = OTHER; note = 2'-O-methyladenosine-3'-phosphorothioate
  modified_base 22: mod_base = OTHER; note = 2'-O-methylguanosine-3'-phosphorothioate
  modified_base 23: mod_base = OTHER; note = 2'-O-methyladenosine
tcaaccaggtcatgtcccacaga

SEQ ID NO: 1118 - RNA, 23 nt, synthetic construct
  source 1..23: mol_type = other RNA
  modified_base 1: mod_base = OTHER; note = 2'-O-methyluridine-3'-phosphorothioate 5'-(E)-Vinylphosphonate
  modified_base 2: mod_base = OTHER; note = 2'-deoxy-2'-fluoroguanosine-3'-phosphorothioate
  modified_base 3: mod_base = OTHER; note = 2'-O-methylcytidine-3'-phosphate
  modified_base 4: mod_base = OTHER; note = 2'-O-methyladenosine-3'-phosphate
  modified_base 5: mod_base = OTHER; note = 2'-O-methyladenosine-3'-phosphate
  modified_base 6: mod_base = OTHER; note = 2'-O-methylcytidine-3'-phosphate
  modified_base 7: mod_base = OTHER; note = cytidine-2'-phosphate
  modified_base 8: mod_base = OTHER; note = 2'-O-methyladenosine-3'-phosphate
  modified_base 9: mod_base = OTHER; note = 2'-O-methylguanosine-3'-phosphate
  modified_base 10: mod_base = OTHER; note = 2'-O-methylguanosine-3'-phosphate
  modified_base 11: mod_base = OTHER; note = 2'-O-methyluridine-3'-phosphate
  modified_base 12: mod_base = OTHER; note = 2'-O-methylcytidine-3'-phosphate
  modified_base 13: mod_base = OTHER; note = 2'-O-methyladenosine-3'-phosphate
  modified_base 14: mod_base = OTHER; note = 2'-deoxy-2'-fluorouridine-3'-phosphate
  modified_base 15: mod_base = OTHER; note = 2'-O-methylguanosine-3'-phosphate
  modified_base 16: mod_base = OTHER; note = 2'-deoxy-2'-fluorouridine-3'-phosphate
  modified_base 17: mod_base = OTHER; note = 2'-O-methylcytidine-3'-phosphate
  modified_base 18: mod_base = OTHER; note = 2'-O-methylcytidine-3'-phosphate
  modified_base 19: mod_base = OTHER; note = 2'-O-methylcytidine-3'-phosphate
  modified_base 20: mod_base = OTHER; note = 2'-O-methyladenosine-3'-phosphate
  modified_base 21: mod_base = OTHER; note = 2'-O-methylcytidine-3'-phosphorothioate
  modified_base 22: mod_base = OTHER; note = 2'-O-methyladenosine-3'-phosphorothioate
  modified_base 23: mod_base = OTHER; note = 2'-O-methylguanosine
tgcaaccaggtcatgtcccacag

SEQ ID NO: 1119 - RNA, 23 nt, synthetic construct
  source 1..23: mol_type = other RNA
  modified_base 1: mod_base = OTHER; note = 2'-O-methyluridine-3'-phosphorothioate 5'-(E)-Vinylphosphonate
  modified_base 2: mod_base = OTHER; note = 2'-deoxy-2'-fluoroadenosine-3'-phosphorothioate
  modified_base 3: mod_base = OTHER; note = 2'-O-methylguanosine-3'-phosphate
  modified_base 4: mod_base = OTHER; note = 2'-O-methylcytidine-3'-phosphate
  modified_base 5: mod_base = OTHER; note = 2'-O-methyladenosine-3'-phosphate
  modified_base 6: mod_base = OTHER; note = 2'-deoxy-2'-fluoroadenosine-3'-phosphate
  modified_base 7: mod_base = OTHER; note = 2'-O-methylcytidine-3'-phosphate
  modified_base 8: mod_base = OTHER; note = 2'-deoxy-2'-fluorocytidine-3'-phosphate
  modified_base 9: mod_base = OTHER; note = 2'-deoxy-2'-fluoroadenosine-3'-phosphate
  modified_base 10: mod_base = OTHER; note = 2'-O-methylguanosine-3'-phosphate
  modified_base 11: mod_base = OTHER; note = 2'-O-methylguanosine-3'-phosphate
  modified_base 12: mod_base = OTHER; note = 2'-O-methyluridine-3'-phosphate
  modified_base 13: mod_base = OTHER; note = 2'-O-methylcytidine-3'-phosphate
  modified_base 14: mod_base = OTHER; note = 2'-deoxy-2'-fluoroadenosine-3'-phosphate
  modified_base 15: mod_base = OTHER; note = 2'-O-methyluridine-3'-phosphate
  modified_base 16: mod_base = OTHER; note = 2'-deoxy-2'-fluoroguanosine-3'-phosphate
  modified_base 17: mod_base = OTHER; note = 2'-O-methyluridine-3'-phosphate
  modified_base 18: mod_base = OTHER; note = 2'-O-methylcytidine-3'-phosphate
  modified_base 19: mod_base = OTHER; note = 2'-O-methylcytidine-3'-phosphate
  modified_base 20: mod_base = OTHER; note = 2'-O-methylcytidine-3'-phosphate
  modified_base 21: mod_base = OTHER; note = 2'-O-methyladenosine-3'-phosphorothioate
  modified_base 22: mod_base = OTHER; note = 2'-O-methylcytidine-3'-phosphorothioate
  modified_base 23: mod_base = OTHER; note = 2'-O-methyladenosine
tagcaaccaggtcatgtcccaca

SEQ ID NO: 1120 - RNA, 23 nt, synthetic construct
  source 1..23: mol_type = other RNA
  modified_base 1: mod_base = OTHER; note = 2'-O-methyluridine-3'-phosphorothioate 5'-(E)-Vinylphosphonate
  modified_base 2: mod_base = OTHER; note = 2'-deoxy-2'-fluorouridine-3'-phosphorothioate
  modified_base 3: mod_base = OTHER; note = 2'-O-methylguanosine-3'-phosphate
  modified_base 4: mod_base = OTHER; note = 2'-O-methyladenosine-3'-phosphate
  modified_base 5: mod_base = OTHER; note = 2'-O-methyladenosine-3'-phosphate
  modified_base 6: mod_base = OTHER; note = 2'-O-methylguanosine-3'-phosphate
  modified_base 7: mod_base = OTHER; note = cytidine-2'-phosphate
  modified_base 8: mod_base = OTHER; note = 2'-O-methyladenosine-3'-phosphate
  modified_base 9: mod_base = OTHER; note = 2'-O-methyladenosine-3'-phosphate
  modified_base 10: mod_base = OTHER; note = 2'-O-methylcytidine-3'-phosphate
  modified_base 11: mod_base = OTHER; note = 2'-O-methylcytidine-3'-phosphate
  modified_base 12: mod_base = OTHER; note = 2'-O-methyladenosine-3'-phosphate
  modified_base 13: mod_base = OTHER; note = 2'-O-methylguanosine-3'-phosphate
  modified_base 14: mod_base = OTHER; note = 2'-deoxy-2'-fluoroguanosine-3'-phosphate
  modified_base 15: mod_base = OTHER; note = 2'-O-methyluridine-3'-phosphate
  modified_base 16: mod_base = OTHER; note = 2'-deoxy-2'-fluorocytidine-3'-phosphate
  modified_base 17: mod_base = OTHER; note = 2'-O-methyladenosine-3'-phosphate
  modified_base 18: mod_base = OTHER; note = 2'-O-methyluridine-3'-phosphate
  modified_base 19: mod_base = OTHER; note = 2'-O-methylguanosine-3'-phosphate
  modified_base 20: mod_base = OTHER; note = 2'-O-methyluridine-3'-phosphate
  modified_base 21: mod_base = OTHER; note = 2'-O-methylcytidine-3'-phosphorothioate
  modified_base 22: mod_base = OTHER; note = 2'-O-methylcytidine-3'-phosphorothioate
  modified_base 23: mod_base = OTHER; note = 2'-O-methylcytidine
ttgaagcaaccaggtcatgtccc

SEQ ID NO: 1121 - RNA, 23 nt, synthetic construct
  source 1..23: mol_type = other RNA
  modified_base 1: mod_base = OTHER; note = 2'-O-methyluridine-3'-phosphorothioate 5'-(E)-Vinylphosphonate
  modified_base 2: mod_base = OTHER; note = 2'-deoxy-2'-fluoroguanosine-3'-phosphorothioate
  modified_base 3: mod_base = OTHER; note = 2'-O-methyluridine-3'-phosphate
  modified_base 4: mod_base = OTHER; note = 2'-O-methylguanosine-3'-phosphate
  modified_base 5: mod_base = OTHER; note = 2'-O-methyladenosine-3'-phosphate
  modified_base 6: mod_base = OTHER; note = 2'-O-methyladenosine-3'-phosphate
  modified_base 7: mod_base = OTHER; note = guanosine-2'-phosphate
  modified_base 8: mod_base = OTHER; note = 2'-O-methylcytidine-3'-phosphate
  modified_base 9: mod_base = OTHER; note = 2'-O-methyladenosine-3'-phosphate
  modified_base 10: mod_base = OTHER; note = 2'-O-methyladenosine-3'-phosphate
  modified_base 11: mod_base = OTHER; note = 2'-O-methylcytidine-3'-phosphate
  modified_base 12: mod_base = OTHER; note = 2'-O-methylcytidine-3'-phosphate
  modified_base 13: mod_base = OTHER; note = 2'-O-methyladenosine-3'-phosphate
  modified_base 14: mod_base = OTHER; note = 2'-deoxy-2'-fluoroguanosine-3'-phosphate
  modified_base 15: mod_base = OTHER; note = 2'-O-methylguanosine-3'-phosphate
  modified_base 16: mod_base = OTHER; note = 2'-deoxy-2'-fluorouridine-3'-phosphate
  modified_base 17: mod_base = OTHER; note = 2'-O-methylcytidine-3'-phosphate
  modified_base 18: mod_base = OTHER; note = 2'-O-methyladenosine-3'-phosphate
  modified_base 19: mod_base = OTHER; note = 2'-O-methyluridine-3'-phosphate
  modified_base 20: mod_base = OTHER; note = 2'-O-methylguanosine-3'-phosphate
  modified_base 21: mod_base = OTHER; note = 2'-O-methyluridine-3'-phosphorothioate
  modified_base 22: mod_base = OTHER; note = 2'-O-methylcytidine-3'-phosphorothioate
  modified_base 23: mod_base = OTHER; note = 2'-O-methylcytidine
tgtgaagcaaccaggtcatgtcc

SEQ ID NO: 1122 - RNA, 23 nt, synthetic construct
  source 1..23: mol_type = other RNA
  modified_base 1: mod_base = OTHER; note = 2'-O-methyluridine-3'-phosphorothioate 5'-(E)-Vinylphosphonate
  modified_base 2: mod_base = OTHER; note = 2'-deoxy-2'-fluoroguanosine-3'-phosphorothioate
  modified_base 3: mod_base = OTHER; note = 2'-O-methylcytidine-3'-phosphate
  modified_base 4: mod_base = OTHER; note = 2'-O-methyluridine-3'-phosphate
  modified_base 5: mod_base = OTHER; note = 2'-O-methylguanosine-3'-phosphate
  modified_base 6: mod_base = OTHER; note = 2'-O-methyluridine-3'-phosphate
  modified_base 7: mod_base = OTHER; note = guanosine-2'-phosphate
  modified_base 8: mod_base = OTHER; note = 2'-O-methyladenosine-3'-phosphate
  modified_base 9: mod_base = OTHER; note = 2'-O-methyladenosine-3'-phosphate
  modified_base 10: mod_base = OTHER; note = 2'-O-methylguanosine-3'-phosphate
  modified_base 11: mod_base = OTHER; note = 2'-O-methylcytidine-3'-phosphate
  modified_base 12: mod_base = OTHER; note = 2'-O-methyladenosine-3'-phosphate
  modified_base 13: mod_base = OTHER; note = 2'-O-methyladenosine-3'-phosphate
  modified_base 14: mod_base = OTHER; note = 2'-deoxy-2'-fluorocytidine-3'-phosphate
  modified_base 15: mod_base = OTHER; note = 2'-O-methylcytidine-3'-phosphate
  modified_base 16: mod_base = OTHER; note = 2'-deoxy-2'-fluoroadenosine-3'-phosphate
  modified_base 17: mod_base = OTHER; note = 2'-O-methylguanosine-3'-phosphate
  modified_base 18: mod_base = OTHER; note = 2'-O-methylguanosine-3'-phosphate
  modified_base 19: mod_base = OTHER; note = 2'-O-methyluridine-3'-phosphate
  modified_base 20: mod_base = OTHER; note = 2'-O-methylcytidine-3'-phosphate
  modified_base 21: mod_base = OTHER; note = 2'-O-methyladenosine-3'-phosphorothioate
  modified_base 22: mod_base = OTHER; note = 2'-O-methyluridine-3'-phosphorothioate
  modified_base 23: mod_base = OTHER; note = 2'-O-methylguanosine
tgctgtgaagcaaccaggtcatg

SEQ ID NO: 1123 - RNA, 23 nt, synthetic construct
  source 1..23: mol_type = other RNA
  modified_base 1: mod_base = OTHER; note = 2'-O-methyluridine-3'-phosphorothioate 5'-(E)-Vinylphosphonate
  modified_base 2: mod_base = OTHER; note = 2'-deoxy-2'-fluoroadenosine-3'-phosphorothioate
  modified_base 3: mod_base = OTHER; note = 2'-O-methylguanosine-3'-phosphate
  modified_base 4: mod_base = OTHER; note = 2'-O-methylcytidine-3'-phosphate
  modified_base 5: mod_base = OTHER; note = 2'-O-methyluridine-3'-phosphate
  modified_base 6: mod_base = OTHER; note = 2'-O-methylguanosine-3'-phosphate
  modified_base 7: mod_base = OTHER; note = Thymidine-glycol nucleic acid (GNA), S-Isomer
  modified_base 8: mod_base = OTHER; note = 2'-O-methylguanosine-3'-phosphate
  modified_base 9: mod_base = OTHER; note = 2'-O-methyladenosine-3'-phosphate
  modified_base 10: mod_base = OTHER; note = 2'-O-methyladenosine-3'-phosphate
  modified_base 11: mod_base = OTHER; note = 2'-O-methylguanosine-3'-phosphate
  modified_base 12: mod_base = OTHER; note = 2'-O-methylcytidine-3'-phosphate
  modified_base 13: mod_base = OTHER; note = 2'-O-methyladenosine-3'-phosphate
  modified_base 14: mod_base = OTHER; note = 2'-deoxy-2'-fluoroadenosine-3'-phosphate
  modified_base 15: mod_base = OTHER; note = 2'-O-methylcytidine-3'-phosphate
  modified_base 16: mod_base = OTHER; note = 2'-deoxy-2'-fluorocytidine-3'-phosphate
  modified_base 17: mod_base = OTHER; note = 2'-O-methyladenosine-3'-phosphate
  modified_base 18: mod_base = OTHER; note = 2'-O-methylguanosine-3'-phosphate
  modified_base 19: mod_base = OTHER; note = 2'-O-methylguanosine-3'-phosphate
  modified_base 20: mod_base = OTHER; note = 2'-O-methyluridine-3'-phosphate
  modified_base 21: mod_base = OTHER; note = 2'-O-methylcytidine-3'-phosphorothioate
  modified_base 22: mod_base = OTHER; note = 2'-O-methyladenosine-3'-phosphorothioate
  modified_base 23: mod_base = OTHER; note = 2'-O-methyluridine
tagctgtgaagcaaccaggtcat

SEQ ID NO: 1124 - RNA, 23 nt, synthetic construct
  source 1..23: mol_type = other RNA
  modified_base 1: mod_base = OTHER; note = 2'-O-methyluridine-3'-phosphorothioate 5'-(E)-Vinylphosphonate
  modified_base 2: mod_base = OTHER; note = 2'-deoxy-2'-fluoroguanosine-3'-phosphorothioate
  modified_base 3: mod_base = OTHER; note = 2'-O-methyladenosine-3'-phosphate
  modified_base 4: mod_base = OTHER; note = 2'-O-methylguanosine-3'-phosphate
  modified_base 5: mod_base = OTHER; note = 2'-O-methylcytidine-3'-phosphate
  modified_base 6: mod_base = OTHER; note = 2'-O-methyluridine-3'-phosphate
  modified_base 7: mod_base = OTHER; note = guanosine-2'-phosphate
  modified_base 8: mod_base = OTHER; note = 2'-O-methyluridine-3'-phosphate
  modified_base 9: mod_base = OTHER; note = 2'-O-methylguanosine-3'-phosphate
  modified_base 10: mod_base = OTHER; note = 2'-O-methyladenosine-3'-phosphate
  modified_base 11: mod_base = OTHER; note = 2'-O-methyladenosine-3'-phosphate
  modified_base 12: mod_base = OTHER; note = 2'-O-methylguanosine-3'-phosphate
  modified_base 13: mod_base = OTHER; note = 2'-O-methylcytidine-3'-phosphate
  modified_base 14: mod_base = OTHER; note = 2'-deoxy-2'-fluoroadenosine-3'-phosphate
  modified_base 15: mod_base = OTHER; note = 2'-O-methyladenosine-3'-phosphate
  modified_base 16: mod_base = OTHER; note = 2'-deoxy-2'-fluorocytidine-3'-phosphate
  modified_base 17: mod_base = OTHER; note = 2'-O-methylcytidine-3'-phosphate
  modified_base 18: mod_base = OTHER; note = 2'-O-methyladenosine-3'-phosphate
  modified_base 19: mod_base = OTHER; note = 2'-O-methylguanosine-3'-phosphate
  modified_base 20: mod_base = OTHER; note = 2'-O-methylguanosine-3'-phosphate
  modified_base 21: mod_base = OTHER; note = 2'-O-methyluridine-3'-phosphorothioate
  modified_base 22: mod_base = OTHER; note = 2'-O-methylcytidine-3'-phosphorothioate
  modified_base 23: mod_base = OTHER; note = 2'-O-methyladenosine
tgagctgtgaagcaaccaggtca

SEQ ID NO: 1125 - RNA, 23 nt, synthetic construct
  source 1..23: mol_type = other RNA
  modified_base 1: mod_base = OTHER; note = 2'-O-methyluridine-3'-phosphorothioate 5'-(E)-Vinylphosphonate
  modified_base 2: mod_base = OTHER; note = 2'-deoxy-2'-fluoroguanosine-3'-phosphorothioate
  modified_base 3: mod_base = OTHER; note = 2'-O-methylguanosine-3'-phosphate
  modified_base 4: mod_base = OTHER; note = 2'-O-methyladenosine-3'-phosphate
  modified_base 5: mod_base = OTHER; note = 2'-O-methylguanosine-3'-phosphate
  modified_base 6: mod_base = OTHER; note = 2'-O-methylcytidine-3'-phosphate
  modified_base 7: mod_base = OTHER; note = Thymidine-glycol nucleic acid (GNA), S-Isomer
  modified_base 8: mod_base = OTHER; note = 2'-O-methylguanosine-3'-phosphate
  modified_base 9: mod_base = OTHER; note = 2'-O-methyluridine-3'-phosphate
  modified_base 10: mod_base = OTHER; note = 2'-O-methylguanosine-3'-phosphate
  modified_base 11: mod_base = OTHER; note = 2'-O-methyladenosine-3'-phosphate
  modified_base 12: mod_base = OTHER; note = 2'-O-methyladenosine-3'-phosphate
  modified_base 13: mod_base = OTHER; note = 2'-O-methylguanosine-3'-phosphate
  modified_base 14: mod_base = OTHER; note = 2'-deoxy-2'-fluorocytidine-3'-phosphate
  modified_base 15: mod_base = OTHER; note = 2'-O-methyladenosine-3'-phosphate
  modified_base 16: mod_base = OTHER; note = 2'-deoxy-2'-fluoroadenosine-3'-phosphate
  modified_base 17: mod_base = OTHER; note = 2'-O-methylcytidine-3'-phosphate
  modified_base 18: mod_base = OTHER; note = 2'-O-methylcytidine-3'-phosphate
  modified_base 19: mod_base = OTHER; note = 2'-O-methyladenosine-3'-phosphate
  modified_base 20: mod_base = OTHER; note = 2'-O-methylguanosine-3'-phosphate
  modified_base 21: mod_base = OTHER; note = 2'-O-methylguanosine-3'-phosphorothioate
  modified_base 22: mod_base = OTHER; note = 2'-O-methyluridine-3'-phosphorothioate
  modified_base 23: mod_base = OTHER; note = 2'-O-methylcytidine
tggagctgtgaagcaaccaggtc

SEQ ID NO: 1126 - RNA, 23 nt, synthetic construct
  source 1..23: mol_type = other RNA
  modified_base 1: mod_base = OTHER; note = 2'-O-methyluridine-3'-phosphorothioate 5'-(E)-Vinylphosphonate
  modified_base 2: mod_base = OTHER; note = 2'-deoxy-2'-fluorocytidine-3'-phosphorothioate
  modified_base 3: mod_base = OTHER; note = 2'-O-methylguanosine-3'-phosphate
  modified_base 4: mod_base = OTHER; note = 2'-O-methylguanosine-3'-phosphate
  modified_base 5: mod_base = OTHER; note = 2'-O-methyladenosine-3'-phosphate
  modified_base 6: mod_base = OTHER; note = 2'-O-methylguanosine-3'-phosphate
  modified_base 7: mod_base = OTHER; note = cytidine-2'-phosphate
  modified_base 8: mod_base = OTHER; note = 2'-O-methyluridine-3'-phosphate
  modified_base 9: mod_base = OTHER; note = 2'-O-methylguanosine-3'-phosphate
  modified_base 10: mod_base = OTHER; note = 2'-O-methyluridine-3'-phosphate
  modified_base 11: mod_base = OTHER; note = 2'-O-methylguanosine-3'-phosphate
  modified_base 12: mod_base = OTHER; note = 2'-O-methyladenosine-3'-phosphate
  modified_base 13: mod_base = OTHER; note = 2'-O-methyladenosine-3'-phosphate
  modified_base 14: mod_base = OTHER; note = 2'-deoxy-2'-fluoroguanosine-3'-phosphate
  modified_base 15: mod_base = OTHER; note = 2'-O-methylcytidine-3'-phosphate
  modified_base 16: mod_base = OTHER; note = 2'-deoxy-2'-fluoroadenosine-3'-phosphate
  modified_base 17: mod_base = OTHER; note = 2'-O-methyladenosine-3'-phosphate
  modified_base 18: mod_base = OTHER; note = 2'-O-methylcytidine-3'-phosphate
  modified_base 19: mod_base = OTHER; note = 2'-O-methylcytidine-3'-phosphate
  modified_base 20: mod_base = OTHER; note = 2'-O-methyladenosine-3'-phosphate
  modified_base 21: mod_base = OTHER; note = 2'-O-methylguanosine-3'-phosphorothioate
  modified_base 22: mod_base = OTHER; note = 2'-O-methylguanosine-3'-phosphorothioate
  modified_base 23: mod_base = OTHER; note = 2'-O-methyluridine
tcggagctgtgaagcaaccaggt

SEQ ID NO: 1127 - RNA, 23 nt, synthetic construct
  source 1..23: mol_type = other RNA
  modified_base 1: mod_base = OTHER; note = 2'-O-methyluridine-3'-phosphorothioate 5'-(E)-Vinylphosphonate
  modified_base 2: mod_base = OTHER; note = 2'-deoxy-2'-fluorouridine-3'-phosphorothioate
  modified_base 3: mod_base = OTHER; note = 2'-O-methylcytidine-3'-phosphate
  modified_base 4: mod_base = OTHER; note = 2'-O-methylguanosine-3'-phosphate
  modified_base 5: mod_base = OTHER; note = 2'-O-methylguanosine-3'-phosphate
  modified_base 6: mod_base = OTHER; note = 2'-O-methyladenosine-3'-phosphate
  modified_base 7: mod_base = OTHER; note = guanosine-2'-phosphate
  modified_base 8: mod_base = OTHER; note = 2'-O-methylcytidine-3'-phosphate
  modified_base 9: mod_base = OTHER; note = 2'-O-methyluridine-3'-phosphate
  modified_base 10: mod_base = OTHER; note = 2'-O-methylguanosine-3'-phosphate
  modified_base 11: mod_base = OTHER; note = 2'-O-methyluridine-3'-phosphate
  modified_base 12: mod_base = OTHER; note = 2'-O-methylguanosine-3'-phosphate
  modified_base 13: mod_base = OTHER; note = 2'-O-methyladenosine-3'-phosphate
  modified_base 14: mod_base = OTHER; note = 2'-deoxy-2'-fluoroadenosine-3'-phosphate
  modified_base 15: mod_base = OTHER; note = 2'-O-methylguanosine-3'-phosphate
  modified_base 16: mod_base = OTHER; note = 2'-deoxy-2'-fluorocytidine-3'-phosphate
  modified_base 17: mod_base = OTHER; note = 2'-O-methyladenosine-3'-phosphate
  modified_base 18: mod_base = OTHER; note = 2'-O-methyladenosine-3'-phosphate
  modified_base 19: mod_base = OTHER; note = 2'-O-methylcytidine-3'-phosphate
  modified_base 20: mod_base = OTHER; note = 2'-O-methylcytidine-3'-phosphate
  modified_base 21: mod_base = OTHER; note = 2'-O-methyladenosine-3'-phosphorothioate
  modified_base 22: mod_base = OTHER; note = 2'-O-methylguanosine-3'-phosphorothioate
  modified_base 23: mod_base = OTHER; note = 2'-O-methylguanosine
ttcggagctgtgaagcaaccagg

SEQ ID NO: 1128 - RNA, 23 nt, synthetic construct
  source 1..23: mol_type = other RNA
  modified_base 1: mod_base = OTHER; note = 2'-O-methyluridine-3'-phosphorothioate 5'-(E)-Vinylphosphonate
  modified_base 2: mod_base = OTHER; note = 2'-deoxy-2'-fluorocytidine-3'-phosphorothioate
  modified_base 3: mod_base = OTHER; note = 2'-O-methyluridine-3'-phosphate
  modified_base 4: mod_base = OTHER; note = 2'-O-methylcytidine-3'-phosphate
  modified_base 5: mod_base = OTHER; note = 2'-O-methylguanosine-3'-phosphate
  modified_base 6: mod_base = OTHER; note = 2'-deoxy-2'-fluoroguanosine-3'-phosphate
  modified_base 7: mod_base = OTHER; note = 2'-O-methyladenosine-3'-phosphate
  modified_base 8: mod_base = OTHER; note = 2'-deoxy-2'-fluoroguanosine-3'-phosphate
  modified_base 9: mod_base = OTHER; note = 2'-deoxy-2'-fluorocytidine-3'-phosphate
  modified_base 10: mod_base = OTHER; note = 2'-O-methyluridine-3'-phosphate
  modified_base 11: mod_base = OTHER; note = 2'-O-methylguanosine-3'-phosphate
  modified_base 12: mod_base = OTHER; note = 2'-O-methyluridine-3'-phosphate
  modified_base 13: mod_base = OTHER; note = 2'-O-methylguanosine-3'-phosphate
  modified_base 14: mod_base = OTHER; note = 2'-deoxy-2'-fluoroadenosine-3'-phosphate
  modified_base 15: mod_base = OTHER; note = 2'-O-methyladenosine-3'-phosphate
  modified_base 16: mod_base = OTHER; note = 2'-deoxy-2'-fluoroguanosine-3'-phosphate
  modified_base 17: mod_base = OTHER; note = 2'-O-methylcytidine-3'-phosphate
  modified_base 18: mod_base = OTHER; note = 2'-O-methyladenosine-3'-phosphate
  modified_base 19: mod_base = OTHER; note = 2'-O-methyladenosine-3'-phosphate
  modified_base 20: mod_base = OTHER; note = 2'-O-methylcytidine-3'-phosphate
  modified_base 21: mod_base = OTHER; note = 2'-O-methylcytidine-3'-phosphorothioate
  modified_base 22: mod_base = OTHER; note = 2'-O-methyladenosine-3'-phosphorothioate
  modified_base 23: mod_base = OTHER; note = 2'-O-methylguanosine
tctcggagctgtgaagcaaccag

SEQ ID NO: 1129 - RNA, 23 nt, synthetic construct
  source 1..23: mol_type = other RNA
  modified_base 1: mod_base = OTHER; note = 2'-O-methyluridine-3'-phosphorothioate 5'-(E)-Vinylphosphonate
  modified_base 2: mod_base = OTHER; note = 2'-deoxy-2'-fluorouridine-3'-phosphorothioate
  modified_base 3: mod_base = OTHER; note = 2'-O-methylcytidine-3'-phosphate
  modified_base 4: mod_base = OTHER; note = 2'-O-methyluridine-3'-phosphate
  modified_base 5: mod_base = OTHER; note = 2'-O-methylcytidine-3'-phosphate
  modified_base 6: mod_base = OTHER; note = 2'-O-methylguanosine-3'-phosphate
  modified_base 7: mod_base = OTHER; note = guanosine-2'-phosphate
  modified_base 8: mod_base = OTHER; note = 2'-O-methyladenosine-3'-phosphate
  modified_base 9: mod_base = OTHER; note = 2'-O-methylguanosine-3'-phosphate
  modified_base 10: mod_base = OTHER; note = 2'-O-methylcytidine-3'-phosphate
  modified_base 11: mod_base = OTHER; note = 2'-O-methyluridine-3'-phosphate
  modified_base 12: mod_base = OTHER; note = 2'-O-methylguanosine-3'-phosphate
  modified_base 13: mod_base = OTHER; note = 2'-O-methyluridine-3'-phosphate
  modified_base 14: mod_base = OTHER; note = 2'-deoxy-2'-fluoroguanosine-3'-phosphate
  modified_base 15: mod_base = OTHER; note = 2'-O-methyladenosine-3'-phosphate
  modified_base 16: mod_base = OTHER; note = 2'-deoxy-2'-fluoroadenosine-3'-phosphate
  modified_base 17: mod_base = OTHER; note = 2'-O-methylguanosine-3'-phosphate
  modified_base 18: mod_base = OTHER; note = 2'-O-methylcytidine-3'-phosphate
  modified_base 19: mod_base = OTHER; note = 2'-O-methyladenosine-3'-phosphate
  modified_base 20: mod_base = OTHER; note = 2'-O-methyladenosine-3'-phosphate
  modified_base 21: mod_base = OTHER; note = 2'-O-methylcytidine-3'-phosphorothioate
  modified_base 22: mod_base = OTHER; note = 2'-O-methylcytidine-3'-phosphorothioate
  modified_base 23: mod_base = OTHER; note = 2'-O-methyladenosine
ttctcggagctgtgaagcaacca

SEQ ID NO: 1130 - RNA, 23 nt, synthetic construct
  source 1..23: mol_type = other RNA
  modified_base 1: mod_base = OTHER; note = 2'-O-methyluridine-3'-phosphorothioate 5'-(E)-Vinylphosphonate
  modified_base 2: mod_base = OTHER; note = 2'-deoxy-2'-fluoroadenosine-3'-phosphorothioate
  modified_base 3: mod_base = OTHER; note = 2'-O-methyluridine-3'-phosphate
  modified_base 4: mod_base = OTHER; note = 2'-O-methylcytidine-3'-phosphate
  modified_base 5: mod_base = OTHER; note = 2'-O-methyluridine-3'-phosphate
  modified_base 6: mod_base = OTHER; note = 2'-O-methylcytidine-3'-phosphate
  modified_base 7: mod_base = OTHER; note = guanosine-2'-phosphate
  modified_base 8: mod_base = OTHER; note = 2'-O-methylguanosine-3'-phosphate
  modified_base 9: mod_base = OTHER; note = 2'-O-methyladenosine-3'-phosphate
  modified_base 10: mod_base = OTHER; note = 2'-O-methylguanosine-3'-phosphate
  modified_base 11: mod_base = OTHER; note = 2'-O-methylcytidine-3'-phosphate
  modified_base 12: mod_base = OTHER; note = 2'-O-methyluridine-3'-phosphate
  modified_base 13: mod_base = OTHER; note = 2'-O-methylguanosine-3'-phosphate
  modified_base 14: mod_base = OTHER; note = 2'-deoxy-2'-fluorouridine-3'-phosphate
  modified_base 15: mod_base = OTHER; note = 2'-O-methylguanosine-3'-phosphate
  modified_base 16: mod_base = OTHER; note = 2'-deoxy-2'-fluoroadenosine-3'-phosphate
  modified_base 17: mod_base = OTHER; note = 2'-O-methyladenosine-3'-phosphate
  modified_base 18: mod_base = OTHER; note = 2'-O-methylguanosine-3'-phosphate
  modified_base 19: mod_base = OTHER; note = 2'-O-methylcytidine-3'-phosphate
  modified_base 20: mod_base = OTHER; note = 2'-O-methyladenosine-3'-phosphate
  modified_base 21: mod_base = OTHER; note = 2'-O-methyladenosine-3'-phosphorothioate
  modified_base 22: mod_base = OTHER; note = 2'-O-methylcytidine-3'-phosphorothioate
  modified_base 23: mod_base = OTHER; note = 2'-O-methylcytidine
tatctcggagctgtgaagcaacc

SEQ ID NO: 1131 - RNA, 23 nt, synthetic construct
  source 1..23: mol_type = other RNA
  modified_base 1: mod_base = OTHER; note = 2'-O-methyluridine-3'-phosphorothioate 5'-(E)-Vinylphosphonate
  modified_base 2: mod_base = OTHER; note = 2'-deoxy-2'-fluorouridine-3'-phosphorothioate
  modified_base 3: mod_base = OTHER; note = 2'-O-methylcytidine-3'-phosphate
  modified_base 4: mod_base = OTHER; note = 2'-O-methyluridine-3'-phosphate
  modified_base 5: mod_base = OTHER; note = 2'-O-methylguanosine-3'-phosphate
  modified_base 6: mod_base = OTHER; note = 2'-O-methyluridine-3'-phosphate
  modified_base 7: mod_base = OTHER; note = guanosine-2'-phosphate
  modified_base 8: mod_base = OTHER; note = 2'-O-methyluridine-3'-phosphate
  modified_base 9: mod_base = OTHER; note = 2'-O-methylcytidine-3'-phosphate
  modified_base 10: mod_base = OTHER; note = 2'-O-methyladenosine-3'-phosphate
  modified_base 11: mod_base = OTHER; note = 2'-O-methyluridine-3'-phosphate
  modified_base 12: mod_base = OTHER; note = 2'-O-methylcytidine-3'-phosphate
  modified_base 13: mod_base = OTHER; note = 2'-O-methyluridine-3'-phosphate
  modified_base 14: mod_base = OTHER; note = 2'-deoxy-2'-fluorocytidine-3'-phosphate
  modified_base 15: mod_base = OTHER; note = 2'-O-methylguanosine-3'-phosphate
  modified_base 16: mod_base = OTHER; note = 2'-deoxy-2'-fluoroguanosine-3'-phosphate
  modified_base 17: mod_base = OTHER; note = 2'-O-methyladenosine-3'-phosphate
  modified_base 18: mod_base = OTHER; note = 2'-O-methylguanosine-3'-phosphate
  modified_base 19: mod_base = OTHER; note = 2'-O-methylcytidine-3'-phosphate
  modified_base 20: mod_base = OTHER; note = 2'-O-methyluridine-3'-phosphate
  modified_base 21: mod_base = OTHER; note = 2'-O-methylguanosine-3'-phosphorothioate
  modified_base 22: mod_base = OTHER; note = 2'-O-methyluridine-3'-phosphorothioate
  modified_base 23: mod_base = OTHER; note = 2'-O-methylguanosine
ttctgtgtcatctcggagctgtg

SEQ ID NO: 1132 - RNA, 23 nt, synthetic construct
  source 1..23: mol_type = other RNA
  modified_base 1: mod_base = OTHER; note = 2'-O-methyluridine-3'-phosphorothioate 5'-(E)-Vinylphosphonate
  modified_base 2: mod_base = OTHER; note = 2'-deoxy-2'-fluoroadenosine-3'-phosphorothioate
  modified_base 3: mod_base = OTHER; note = 2'-O-methylguanosine-3'-phosphate
  modified_base 4: mod_base = OTHER; note = 2'-O-methyluridine-3'-phosphate
  modified_base 5: mod_base = OTHER; note = 2'-O-methylcytidine-3'-phosphate
  modified_base 6: mod_base = OTHER; note = 2'-O-methyluridine-3'-phosphate
  modified_base 7: mod_base = OTHER; note = guanosine-2'-phosphate
  modified_base 8: mod_base = OTHER; note = 2'-O-methyluridine-3'-phosphate
  modified_base 9: mod_base = OTHER; note = 2'-O-methylguanosine-3'-phosphate
  modified_base 10: mod_base = OTHER; note = 2'-O-methyluridine-3'-phosphate
  modified_base 11: mod_base = OTHER; note = 2'-O-methylcytidine-3'-phosphate
  modified_base 12: mod_base = OTHER; note = 2'-O-methyladenosine-3'-phosphate
  modified_base 13: mod_base = OTHER; note = 2'-O-methyluridine-3'-phosphate
  modified_base 14: mod_base = OTHER; note = 2'-deoxy-2'-fluorocytidine-3'-phosphate
  modified_base 15: mod_base = OTHER; note = 2'-O-methyluridine-3'-phosphate
  modified_base 16: mod_base = OTHER; note = 2'-deoxy-2'-fluorocytidine-3'-phosphate
  modified_base 17: mod_base = OTHER; note = 2'-O-methylguanosine-3'-phosphate
  modified_base 18: mod_base = OTHER; note = 2'-O-methylguanosine-3'-phosphate
  modified_base 19: mod_base = OTHER; note = 2'-O-methyladenosine-3'-phosphate
  modified_base 20: mod_base = OTHER; note = 2'-O-methylguanosine-3'-phosphate
  modified_base 21: mod_base = OTHER; note = 2'-O-methylcytidine-3'-phosphorothioate
  modified_base 22: mod_base = OTHER; note = 2'-O-methyluridine-3'-phosphorothioate
  modified_base 23: mod_base = OTHER; note = 2'-O-methylguanosine
tagtctgtgtcatctcggagctg

SEQ ID NO: 1133 - RNA, 23 nt, synthetic construct
  source 1..23: mol_type = other RNA
  modified_base 1: mod_base = OTHER; note = 2'-O-methyluridine-3'-phosphorothioate 5'-(E)-Vinylphosphonate
  modified_base 2: mod_base = OTHER; note = 2'-deoxy-2'-fluoroadenosine-3'-phosphorothioate
  modified_base 3: mod_base = OTHER; note = 2'-O-methyladenosine-3'-phosphate
  modified_base 4: mod_base = OTHER; note = 2'-O-methylguanosine-3'-phosphate
  modified_base 5: mod_base = OTHER; note = 2'-O-methyluridine-3'-phosphate
  modified_base 6: mod_base = OTHER; note = 2'-O-methylcytidine-3'-phosphate
  modified_base 7: mod_base = OTHER; note = Thymidine-glycol nucleic acid (GNA), S-Isomer
  modified_base 8: mod_base = OTHER; note = 2'-O-methylguanosine-3'-phosphate
  modified_base 9: mod_base = OTHER; note = 2'-O-methyluridine-3'-phosphate
  modified_base 10: mod_base = OTHER; note = 2'-O-methylguanosine-3'-phosphate
  modified_base 11: mod_base = OTHER; note = 2'-O-methyluridine-3'-phosphate
  modified_base 12: mod_base = OTHER; note = 2'-O-methylcytidine-3'-phosphate
  modified_base 13: mod_base = OTHER; note = 2'-O-methyladenosine-3'-phosphate
  modified_base 14: mod_base = OTHER; note = 2'-deoxy-2'-fluorouridine-3'-phosphate
  modified_base 15: mod_base = OTHER; note = 2'-O-methylcytidine-3'-phosphate
  modified_base 16: mod_base = OTHER; note = 2'-deoxy-2'-fluorouridine-3'-phosphate
  modified_base 17: mod_base = OTHER; note = 2'-O-methylcytidine-3'-phosphate
  modified_base 18: mod_base = OTHER; note = 2'-O-methylguanosine-3'-phosphate
  modified_base 19: mod_base = OTHER; note = 2'-O-methylguanosine-3'-phosphate
  modified_base 20: mod_base = OTHER; note = 2'-O-methyladenosine-3'-phosphate
  modified_base 21: mod_base = OTHER; note = 2'-O-methylguanosine-3'-phosphorothioate
  modified_base 22: mod_base = OTHER; note = 2'-O-methylcytidine-3'-phosphorothioate
  modified_base 23: mod_base = OTHER; note = 2'-O-methyluridine
taagtctgtgtcatctcggagct

SEQ ID NO: 1134 - RNA, 23 nt, synthetic construct
  source 1..23: mol_type = other RNA
  modified_base 1: mod_base = OTHER; note = 2'-O-methyluridine-3'-phosphorothioate 5'-(E)-Vinylphosphonate
  modified_base 2: mod_base = OTHER; note = 2'-deoxy-2'-fluorocytidine-3'-phosphorothioate
  modified_base 3: mod_base = OTHER; note = 2'-O-methyladenosine-3'-phosphate
  modified_base 4: mod_base = OTHER; note = 2'-O-methyladenosine-3'-phosphate
  modified_base 5: mod_base = OTHER; note = 2'-O-methylguanosine-3'-phosphate
  modified_base 6: mod_base = OTHER; note = 2'-O-methyluridine-3'-phosphate
  modified_base 7: mod_base = OTHER; note = cytidine-2'-phosphate
  modified_base 8: mod_base = OTHER; note = 2'-O-methyluridine-3'-phosphate
  modified_base 9: mod_base = OTHER; note = 2'-O-methylguanosine-3'-phosphate
  modified_base 10: mod_base = OTHER; note = 2'-O-methyluridine-3'-phosphate
  modified_base 11: mod_base = OTHER; note = 2'-O-methylguanosine-3'-phosphate
  modified_base 12: mod_base = OTHER; note = 2'-O-methyluridine-3'-phosphate
  modified_base 13: mod_base = OTHER; note = 2'-O-methylcytidine-3'-phosphate
  modified_base 14: mod_base = OTHER; note = 2'-deoxy-2'-fluoroadenosine-3'-phosphate
  modified_base 15: mod_base = OTHER; note = 2'-O-methyluridine-3'-phosphate
  modified_base 16: mod_base = OTHER; note = 2'-deoxy-2'-fluorocytidine-3'-phosphate
  modified_base 17: mod_base = OTHER; note = 2'-O-methyluridine-3'-phosphate
  modified_base 18: mod_base = OTHER; note = 2'-O-methylcytidine-3'-phosphate
  modified_base 19: mod_base = OTHER; note = 2'-O-methylguanosine-3'-phosphate
  modified_base 20: mod_base = OTHER; note = 2'-O-methylguanosine-3'-phosphate
  modified_base 21: mod_base = OTHER; note = 2'-O-methyladenosine-3'-phosphorothioate
  modified_base 22: mod_base = OTHER; note = 2'-O-methylguanosine-3'-phosphorothioate
  modified_base 23: mod_base = OTHER; note = 2'-O-methylcytidine
tcaagtctgtgtcatctcggagc

SEQ ID NO: 1135 - RNA, 23 nt, synthetic construct
  source 1..23: mol_type = other RNA
  modified_base 1: mod_base = OTHER; note = 2'-O-methyluridine-3'-phosphorothioate 5'-(E)-Vinylphosphonate
  modified_base 2: mod_base = OTHER; note = 2'-deoxy-2'-fluoroguanosine-3'-phosphorothioate
  modified_base 3: mod_base = OTHER; note = 2'-O-methylcytidine-3'-phosphate
  modified_base 4: mod_base = OTHER; note = 2'-O-methyladenosine-3'-phosphate
  modified_base 5: mod_base = OTHER; note = 2'-O-methyladenosine-3'-phosphate
  modified_base 6: mod_base = OTHER; note = 2'-O-methylguanosine-3'-phosphate
  modified_base 7: mod_base = OTHER; note = Thymidine-glycol nucleic acid (GNA), S-Isomer
  modified_base 8: mod_base = OTHER; note = 2'-O-methylcytidine-3'-phosphate
  modified_base 9: mod_base = OTHER; note = 2'-O-methyluridine-3'-phosphate
  modified_base 10: mod_base = OTHER; note = 2'-O-methylguanosine-3'-phosphate
  modified_base 11: mod_base = OTHER; note = 2'-O-methyluridine-3'-phosphate
  modified_base 12: mod_base = OTHER; note = 2'-O-methylguanosine-3'-phosphate
  modified_base 13: mod_base = OTHER; note = 2'-O-methyluridine-3'-phosphate
  modified_base 14: mod_base = OTHER; note = 2'-deoxy-2'-fluorocytidine-3'-phosphate
  modified_base 15: mod_base = OTHER; note = 2'-O-methyladenosine-3'-phosphate
  modified_base 16: mod_base = OTHER; note = 2'-deoxy-2'-fluorouridine-3'-phosphate
  modified_base 17: mod_base = OTHER; note = 2'-O-methylcytidine-3'-phosphate
  modified_base 18: mod_base = OTHER; note = 2'-O-methyluridine-3'-phosphate
  modified_base 19: mod_base = OTHER; note = 2'-O-methylcytidine-3'-phosphate
  modified_base 20: mod_base = OTHER; note = 2'-O-methylguanosine-3'-phosphate
  modified_base 21: mod_base = OTHER; note = 2'-O-methylguanosine-3'-phosphorothioate
  modified_base 22: mod_base = OTHER; note = 2'-O-methyladenosine-3'-phosphorothioate
  modified_base 23: mod_base = OTHER; note = 2'-O-methylguanosine
tgcaagtctgtgtcatctcggag

SEQ ID NO: 1136 - RNA, 23 nt, synthetic construct
  source 1..23: mol_type = other RNA
  modified_base 1: mod_base = OTHER; note = 2'-O-methyluridine-3'-phosphorothioate 5'-(E)-Vinylphosphonate
  modified_base 2: mod_base = OTHER; note = 2'-deoxy-2'-fluoroadenosine-3'-phosphorothioate
  modified_base 3: mod_base = OTHER; note = 2'-O-methylguanosine-3'-phosphate
  modified_base 4: mod_base = OTHER; note = 2'-O-methylcytidine-3'-phosphate
  modified_base 5: mod_base = OTHER; note = 2'-O-methyladenosine-3'-phosphate
  modified_base 6: mod_base = OTHER; note = 2'-O-methyladenosine-3'-phosphate
  modified_base 7: mod_base = OTHER; note = guanosine-2'-phosphate
  modified_base 8: mod_base = OTHER; note = 2'-O-methyluridine-3'-phosphate
  modified_base 9: mod_base = OTHER; note = 2'-O-methylcytidine-3'-phosphate
  modified_base 10: mod_base = OTHER; note = 2'-O-methyluridine-3'-phosphate
  modified_base 11: mod_base = OTHER; note = 2'-O-methylguanosine-3'-phosphate
  modified_base 12: mod_base = OTHER; note = 2'-O-methyluridine-3'-phosphate
  modified_base 13: mod_base = OTHER; note = 2'-O-methylguanosine-3'-phosphate
  modified_base 14: mod_base = OTHER; note = 2'-deoxy-2'-fluorouridine-3'-phosphate
  modified_base 15: mod_base = OTHER; note = 2'-O-methylcytidine-3'-phosphate
  modified_base 16: mod_base = OTHER; note = 2'-deoxy-2'-fluoroadenosine-3'-phosphate
  modified_base 17: mod_base = OTHER; note = 2'-O-methyluridine-3'-phosphate
  modified_base 18: mod_base = OTHER; note = 2'-O-methylcytidine-3'-phosphate
  modified_base 19: mod_base = OTHER; note = 2'-O-methyluridine-3'-phosphate
  modified_base 20: mod_base = OTHER; note = 2'-O-methylcytidine-3'-phosphate
  modified_base 21: mod_base = OTHER; note = 2'-O-methylguanosine-3'-phosphorothioate
  modified_base 22: mod_base = OTHER; note = 2'-O-methylguanosine-3'-phosphorothioate
  modified_base 23: mod_base = OTHER; note = 2'-O-methyladenosine
tagcaagtctgtgtcatctcgga

SEQ ID NO: 1137 - RNA, 23 nt, synthetic construct
  source 1..23: mol_type = other RNA
  modified_base 1: mod_base = OTHER; note = 2'-O-methyluridine-3'-phosphorothioate 5'-(E)-Vinylphosphonate
  modified_base 2: mod_base = OTHER; note = 2'-deoxy-2'-fluoroadenosine-3'-phosphorothioate
  modified_base 3: mod_base = OTHER; note = 2'-O-methyladenosine-3'-phosphate
  modified_base 4: mod_base = OTHER; note = 2'-O-methylguanosine-3'-phosphate
  modified_base 5: mod_base = OTHER; note = 2'-O-methylcytidine-3'-phosphate
  modified_base 6: mod_base = OTHER; note = 2'-O-methyladenosine-3'-phosphate
  modified_base 7: mod_base = OTHER; note = Adenosine-glycol nucleic acid (GNA), S-isomer
  modified_base 8: mod_base = OTHER; note = 2'-O-methylguanosine-3'-phosphate
  modified_base 9: mod_base = OTHER; note = 2'-O-methyluridine-3'-phosphate
  modified_base 10: mod_base = OTHER; note = 2'-O-methylcytidine-3'-phosphate
  modified_base 11: mod_base = OTHER; note = 2'-O-methyluridine-3'-phosphate
  modified_base 12: mod_base = OTHER; note = 2'-O-methylguanosine-3'-phosphate
  modified_base 13: mod_base = OTHER; note = 2'-O-methyluridine-3'-phosphate
  modified_base 14: mod_base = OTHER; note = 2'-deoxy-2'-fluoroguanosine-3'-phosphate
  modified_base 15: mod_base = OTHER; note = 2'-O-methyluridine-3'-phosphate
  modified_base 16: mod_base = OTHER; note = 2'-deoxy-2'-fluorocytidine-3'-phosphate
  modified_base 17: mod_base = OTHER; note = 2'-O-methyladenosine-3'-phosphate
  modified_base 18: mod_base = OTHER; note = 2'-O-methyluridine-3'-phosphate
  modified_base 19: mod_base = OTHER; note = 2'-O-methylcytidine-3'-phosphate
  modified_base 20: mod_base = OTHER; note = 2'-O-methyluridine-3'-phosphate
  modified_base 21: mod_base = OTHER; note = 2'-O-methylcytidine-3'-phosphorothioate
  modified_base 22: mod_base = OTHER; note = 2'-O-methylguanosine-3'-phosphorothioate
  modified_base 23: mod_base = OTHER; note = 2'-O-methylguanosine
taagcaagtctgtgtcatctcgg

SEQ ID NO: 1138 - RNA, 23 nt, synthetic construct
  source 1..23: mol_type = other RNA
  modified_base 1: mod_base = OTHER; note = 2'-O-methyluridine-3'-phosphorothioate 5'-(E)-Vinylphosphonate
  modified_base 2: mod_base = OTHER; note = 2'-deoxy-2'-fluorouridine-3'-phosphorothioate
  modified_base 3: mod_base = OTHER; note = 2'-O-methyluridine-3'-phosphate
  modified_base 4: mod_base = OTHER; note = 2'-O-methyladenosine-3'-phosphate
  modified_base 5: mod_base = OTHER; note = 2'-O-methyladenosine-3'-phosphate
  modified_base 6: mod_base = OTHER; note = 2'-O-methylguanosine-3'-phosphate
  modified_base 7: mod_base = OTHER; note = cytidine-2'-phosphate
  modified_base 8: mod_base = OTHER; note = 2'-O-methyladenosine-3'-phosphate
  modified_base 9: mod_base = OTHER; note = 2'-O-methyladenosine-3'-phosphate
  modified_base 10: mod_base = OTHER; note = 2'-O-methylguanosine-3'-phosphate
  modified_base 11: mod_base = OTHER; note = 2'-O-methyluridine-3'-phosphate
  modified_base 12: mod_base = OTHER; note = 2'-O-methylcytidine-3'-phosphate
  modified_base 13: mod_base = OTHER; note = 2'-O-methyluridine-3'-phosphate
  modified_base 14: mod_base = OTHER; note = 2'-deoxy-2'-fluoroguanosine-3'-phosphate
  modified_base 15: mod_base = OTHER; note = 2'-O-methyluridine-3'-phosphate
  modified_base 16: mod_base = OTHER; note = 2'-deoxy-2'-fluoroguanosine-3'-phosphate
  modified_base 17: mod_base = OTHER; note = 2'-O-methyluridine-3'-phosphate
  modified_base 18: mod_base = OTHER; note = 2'-O-methylcytidine-3'-phosphate
  modified_base 19: mod_base = OTHER; note = 2'-O-methyladenosine-3'-phosphate
  modified_base 20: mod_base = OTHER; note = 2'-O-methyluridine-3'-phosphate
  modified_base 21: mod_base = OTHER; note = 2'-O-methylcytidine-3'-phosphorothioate
  modified_base 22: mod_base = OTHER; note = 2'-O-methyluridine-3'-phosphorothioate
  modified_base 23: mod_base = OTHER; note = 2'-O-methylcytidine
tttaagcaagtctgtgtcatctc

SEQ ID NO: 1139 - RNA, 23 nt, synthetic construct
  source 1..23: mol_type = other RNA
  modified_base 1: mod_base = OTHER; note = 2'-O-methyluridine-3'-phosphorothioate 5'-(E)-Vinylphosphonate
  modified_base 2: mod_base = OTHER; note = 2'-deoxy-2'-fluorouridine-3'-phosphorothioate
  modified_base 3: mod_base = OTHER; note = 2'-O-methyluridine-3'-phosphate
  modified_base 4: mod_base = OTHER; note = 2'-O-methyluridine-3'-phosphate
  modified_base 5: mod_base = OTHER; note = 2'-O-methyladenosine-3'-phosphate
  modified_base 6: mod_base = OTHER; note = 2'-O-methyladenosine-3'-phosphate
  modified_base 7: mod_base = OTHER; note = guanosine-2'-phosphate
  modified_base 8: mod_base = OTHER; note = 2'-O-methylcytidine-3'-phosphate
  modified_base 9: mod_base = OTHER; note = 2'-O-methyladenosine-3'-phosphate
  modified_base 10: mod_base = OTHER; note = 2'-O-methyladenosine-3'-phosphate
  modified_base 11: mod_base = OTHER; note = 2'-O-methylguanosine-3'-phosphate
  modified_base 12: mod_base = OTHER; note = 2'-O-methyluridine-3'-phosphate
  modified_base 13: mod_base = OTHER; note = 2'-O-methylcytidine-3'-phosphate
  modified_base 14: mod_base = OTHER; note = 2'-deoxy-2'-fluorouridine-3'-phosphate
  modified_base 15: mod_base = OTHER; note = 2'-O-methylguanosine-3'-phosphate
  modified_base 16: mod_base = OTHER; note = 2'-deoxy-2'-fluorouridine-3'-phosphate
  modified_base 17: mod_base = OTHER; note = 2'-O-methylguanosine-3'-phosphate
  modified_base 18: mod_base = OTHER; note = 2'-O-methyluridine-3'-phosphate
  modified_base 19: mod_base = OTHER; note = 2'-O-methylcytidine-3'-phosphate
  modified_base 20: mod_base = OTHER; note = 2'-O-methyladenosine-3'-phosphate
  modified_base 21: mod_base = OTHER; note = 2'-O-methyluridine-3'-phosphorothioate
  modified_base 22: mod_base = OTHER; note = 2'-O-methylcytidine-3'-phosphorothioate
  modified_base 23: mod_base = OTHER; note = 2'-O-methyluridine
ttttaagcaagtctgtgtcatct

SEQ ID NO: 1140 - RNA, 23 nt, synthetic construct
  source 1..23: mol_type = other RNA
  modified_base 1: mod_base = OTHER; note = 2'-O-methyluridine-3'-phosphorothioate 5'-(E)-Vinylphosphonate
  modified_base 2: mod_base = OTHER; note = 2'-deoxy-2'-fluorocytidine-3'-phosphorothioate
  modified_base 3: mod_base = OTHER; note = 2'-O-methyluridine-3'-phosphate
  modified_base 4: mod_base = OTHER; note = 2'-O-methyluridine-3'-phosphate
  modified_base 5: mod_base = OTHER; note = 2'-O-methyluridine-3'-phosphate
  modified_base 6: mod_base = OTHER; note = 2'-deoxy-2'-fluoroadenosine-3'-phosphate
  modified_base 7: mod_base = OTHER; note = 2'-O-methyladenosine-3'-phosphate
  modified_base 8: mod_base = OTHER; note = 2'-deoxy-2'-fluoroguanosine-3'-phosphate
  modified_base 9: mod_base = OTHER; note = 2'-deoxy-2'-fluorocytidine-3'-phosphate
  modified_base 10: mod_base = OTHER; note = 2'-O-methyladenosine-3'-phosphate
  modified_base 11: mod_base = OTHER; note = 2'-O-methyladenosine-3'-phosphate
  modified_base 12: mod_base = OTHER; note = 2'-O-methylguanosine-3'-phosphate
  modified_base 13: mod_base = OTHER; note = 2'-O-methyluridine-3'-phosphate
  modified_base 14: mod_base = OTHER; note = 2'-deoxy-2'-fluorocytidine-3'-phosphate
  modified_base 15: mod_base = OTHER; note = 2'-O-methyluridine-3'-phosphate
  modified_base 16: mod_base = OTHER; note = 2'-deoxy-2'-fluoroguanosine-3'-phosphate
  modified_base 17: mod_base = OTHER; note = 2'-O-methyluridine-3'-phosphate
  modified_base 18: mod_base = OTHER; note = 2'-O-methylguanosine-3'-phosphate
  modified_base 19: mod_base = OTHER; note = 2'-O-methyluridine-3'-phosphate
  modified_base 20: mod_base = OTHER; note = 2'-O-methylcytidine-3'-phosphate
  modified_base 21: mod_base = OTHER; note = 2'-O-methyladenosine-3'-phosphorothioate
  modified_base 22: mod_base = OTHER; note = 2'-O-methyluridine-3'-phosphorothioate
  modified_base 23: mod_base = OTHER; note = 2'-O-methylcytidine
tctttaagcaagtctgtgtcatc

SEQ ID NO: 1141 - RNA, 23 nt, synthetic construct
  source 1..23: mol_type = other RNA
  modified_base 1: mod_base = OTHER; note = 2'-O-methyluridine-3'-phosphorothioate 5'-(E)-Vinylphosphonate
  modified_base 2: mod_base = OTHER; note = 2'-deoxy-2'-fluorocytidine-3'-phosphorothioate
  modified_base 3: mod_base = OTHER; note = 2'-O-methylcytidine-3'-phosphate
  modified_base 4: mod_base = OTHER; note = 2'-O-methyluridine-3'-phosphate
  modified_base 5: mod_base = OTHER; note = 2'-O-methyluridine-3'-phosphate
  modified_base 6: mod_base = OTHER; note = 2'-deoxy-2'-fluorouridine-3'-phosphate
  modified_base 7: mod_base = OTHER; note = 2'-O-methyladenosine-3'-phosphate
  modified_base 8: mod_base = OTHER; note = 2'-deoxy-2'-fluoroadenosine-3'-phosphate
  modified_base 9: mod_base = OTHER; note = 2'-deoxy-2'-fluoroguanosine-3'-phosphate
  modified_base 10: mod_base = OTHER; note = 2'-O-methylcytidine-3'-phosphate
  modified_base 11: mod_base = OTHER; note = 2'-O-methyladenosine-3'-phosphate
  modified_base 12: mod_base = OTHER; note = 2'-O-methyladenosine-3'-phosphate
  modified_base 13: mod_base = OTHER; note = 2'-O-methylguanosine-3'-phosphate
  modified_base 14: mod_base = OTHER; note = 2'-deoxy-2'-fluorouridine-3'-phosphate
  modified_base 15: mod_base = OTHER; note = 2'-O-methylcytidine-3'-phosphate
  modified_base 16: mod_base = OTHER; note = 2'-deoxy-2'-fluorouridine-3'-phosphate
  modified_base 17: mod_base = OTHER; note = 2'-O-methylguanosine-3'-phosphate
  modified_base 18: mod_base = OTHER; note = 2'-O-methyluridine-3'-phosphate
  modified_base 19: mod_base = OTHER; note = 2'-O-methylguanosine-3'-phosphate
  modified_base 20: mod_base = OTHER; note = 2'-O-methyluridine-3'-phosphate
  modified_base 21: mod_base = OTHER; note = 2'-O-methylcytidine-3'-phosphorothioate
  modified_base 22: mod_base = OTHER; note = 2'-O-methyladenosine-3'-phosphorothioate
  modified_base 23: mod_base = OTHER; note = 2'-O-methyluridine
tcctttaagcaagtctgtgtcat

SEQ ID NO: 1142 - RNA, 23 nt, synthetic construct
  source 1..23: mol_type = other RNA
  modified_base 1: mod_base = OTHER; note = 2'-O-methyluridine-3'-phosphorothioate 5'-(E)-Vinylphosphonate
  modified_base 2: mod_base = OTHER; note = 2'-deoxy-2'-fluorouridine-3'-phosphorothioate
  modified_base 3: mod_base = OTHER; note = 2'-O-methylcytidine-3'-phosphate
  modified_base 4: mod_base = OTHER; note = 2'-O-methylcytidine-3'-phosphate
  modified_base 5: mod_base = OTHER; note = 2'-O-methyluridine-3'-phosphate
  modified_base 6: mod_base = OTHER; note = 2'-deoxy-2'-fluorouridine-3'-phosphate
  modified_base 7: mod_base = OTHER; note = 2'-O-methyluridine-3'-phosphate
  modified_base 8: mod_base = OTHER; note = 2'-deoxy-2'-fluoroadenosine-3'-phosphate
  modified_base 9: mod_base = OTHER; note = 2'-deoxy-2'-fluoroadenosine-3'-phosphate
  modified_base 10: mod_base = OTHER; note = 2'-O-methylguanosine-3'-phosphate
  modified_base 11: mod_base = OTHER; note = 2'-O-methylcytidine-3'-phosphate
  modified_base 12: mod_base = OTHER; note = 2'-O-methyladenosine-3'-phosphate
  modified_base 13: mod_base = OTHER; note = 2'-O-methyladenosine-3'-phosphate
  modified_base 14: mod_base = OTHER; note = 2'-deoxy-2'-fluoroguanosine-3'-phosphate
  modified_base 15: mod_base = OTHER; note = 2'-O-methyluridine-3'-phosphate
  modified_base 16: mod_base = OTHER; note = 2'-deoxy-2'-fluorocytidine-3'-phosphate
  modified_base 17: mod_base = OTHER; note = 2'-O-methyluridine-3'-phosphate
  modified_base 18: mod_base = OTHER; note = 2'-O-methylguanosine-3'-phosphate
  modified_base 19: mod_base = OTHER; note = 2'-O-methyluridine-3'-phosphate
  modified_base 20: mod_base = OTHER; note = 2'-O-methylguanosine-3'-phosphate
  modified_base 21: mod_base = OTHER; note = 2'-O-methyluridine-3'-phosphorothioate
  modified_base 22: mod_base = OTHER; note = 2'-O-methylcytidine-3'-phosphorothioate
  modified_base 23: mod_base = OTHER; note = 2'-O-methyladenosine
ttcctttaagcaagtctgtgtca

SEQ ID NO: 1143 - RNA, 23 nt, synthetic construct
  source 1..23: mol_type = other RNA
  modified_base 1: mod_base = OTHER; note = 2'-O-methyluridine-3'-phosphorothioate 5'-(E)-Vinylphosphonate
  modified_base 2: mod_base = OTHER; note = 2'-deoxy-2'-fluoroadenosine-3'-phosphorothioate
  modified_base 3: mod_base = OTHER; note = 2'-O-methylcytidine-3'-phosphate
  modified_base 4: mod_base = OTHER; note = 2'-O-methyluridine-3'-phosphate
  modified_base 5: mod_base = OTHER; note = 2'-O-methyluridine-3'-phosphate
  modified_base 6: mod_base = OTHER; note = 2'-O-methylcytidine-3'-phosphate
  modified_base 7: mod_base = OTHER; note = cytidine-2'-phosphate
  modified_base 8: mod_base = OTHER; note = 2'-O-methyluridine-3'-phosphate
  modified_base 9: mod_base = OTHER; note = 2'-O-methyluridine-3'-phosphate
  modified_base 10: mod_base = OTHER; note = 2'-O-methyluridine-3'-phosphate
  modified_base 11: mod_base = OTHER; note = 2'-O-methyladenosine-3'-phosphate
  modified_base 12: mod_base = OTHER; note = 2'-O-methyladenosine-3'-phosphate
  modified_base 13: mod_base = OTHER; note = 2'-O-methylguanosine-3'-phosphate
  modified_base 14: mod_base = OTHER; note = 2'-deoxy-2'-fluorocytidine-3'-phosphate
  modified_base 15: mod_base = OTHER; note = 2'-O-methyladenosine-3'-phosphate
  modified_base 16: mod_base = OTHER; note = 2'-deoxy-2'-fluoroadenosine-3'-phosphate
  modified_base 17: mod_base = OTHER; note = 2'-O-methylguanosine-3'-phosphate
  modified_base 18: mod_base = OTHER; note = 2'-O-methyluridine-3'-phosphate
  modified_base 19: mod_base = OTHER; note = 2'-O-methylcytidine-3'-phosphate
  modified_base 20: mod_base = OTHER; note = 2'-O-methyluridine-3'-phosphate
  modified_base 21: mod_base = OTHER; note = 2'-O-methylguanosine-3'-phosphorothioate
  modified_base 22: mod_base = OTHER; note = 2'-O-methyluridine-3'-phosphorothioate
  modified_base 23: mod_base = OTHER; note = 2'-O-methylguanosine
tacttcctttaagcaagtctgtg

SEQ ID NO: 1144 - RNA, 23 nt, synthetic construct
  source 1..23: mol_type = other RNA
  modified_base 1: mod_base = OTHER; note = 2'-O-methyluridine-3'-phosphorothioate 5'-(E)-Vinylphosphonate
  modified_base 2: mod_base = OTHER; note = 2'-deoxy-2'-fluorocytidine-3'-phosphorothioate
  modified_base 3: mod_base = OTHER; note = 2'-O-methyladenosine-3'-phosphate
  modified_base 4: mod_base = OTHER; note = 2'-O-methylcytidine-3'-phosphate
  modified_base 5: mod_base = OTHER; note = 2'-O-methyluridine-3'-phosphate
  modified_base 6: mod_base = OTHER; note = 2'-O-methyluridine-3'-phosphate
  modified_base 7: mod_base = OTHER; note = cytidine-2'-phosphate
  modified_base 8: mod_base = OTHER; note = 2'-O-methylcytidine-3'-phosphate
  modified_base 9: mod_base = OTHER; note = 2'-O-methyluridine-3'-phosphate
  modified_base 10: mod_base = OTHER; note = 2'-O-methyluridine-3'-phosphate
  modified_base 11: mod_base = OTHER; note = 2'-O-methyluridine-3'-phosphate
  modified_base 12: mod_base = OTHER; note = 2'-O-methyladenosine-3'-phosphate
  modified_base 13: mod_base = OTHER; note = 2'-O-methyladenosine-3'-phosphate
  modified_base 14: mod_base = OTHER; note = 2'-deoxy-2'-fluoroguanosine-3'-phosphate
  modified_base 15: mod_base = OTHER; note = 2'-O-methylcytidine-3'-phosphate
  modified_base 16: mod_base = OTHER; note = 2'-deoxy-2'-fluoroadenosine-3'-phosphate
  modified_base 17: mod_base = OTHER; note = 2'-O-methyladenosine-3'-phosphate
  modified_base 18: mod_base = OTHER; note = 2'-O-methylguanosine-3'-phosphate
  modified_base 19: mod_base = OTHER; note = 2'-O-methyluridine-3'-phosphate
  modified_base 20: mod_base = OTHER; note = 2'-O-methylcytidine-3'-phosphate
  modified_base 21: mod_base = OTHER; note = 2'-O-methyluridine-3'-phosphorothioate
  modified_base 22: mod_base = OTHER; note = 2'-O-methylguanosine-3'-phosphorothioate
  modified_base 23: mod_base = OTHER; note = 2'-O-methyluridine
tcacttcctttaagcaagtctgt

SEQ ID NO: 1145 - RNA, 23 nt, synthetic construct
  source 1..23: mol_type = other RNA
acgtaacctacggtgtcccgcta

SEQ ID NO: 1146 - RNA, 23 nt, synthetic construct
  source 1..23: mol_type = other RNA
gtgtcccgctaggaaagagaggt

SEQ ID NO: 1147 - RNA, 23 nt, synthetic construct
  source 1..23: mol_type = other RNA
gtcccgctaggaaagagaggtgc

SEQ ID NO: 1148 - RNA, 23 nt, synthetic construct
  source 1..23: mol_type = other RNA
cccgctaggaaagagaggtgcgt

SEQ ID NO: 1149 - RNA, 23 nt, synthetic construct
  source 1..23: mol_type = other RNA
ccgctaggaaagagaggtgcgtc

SEQ ID NO: 1150 - RNA, 23 nt, synthetic construct
  source 1..23: mol_type = other RNA
gctaggaaagagaggtgcgtcaa

SEQ ID NO: 1151 - RNA, 23 nt, synthetic construct
  source 1..23: mol_type = other RNA
agaggtgcgtcaaacagcgacaa

SEQ ID NO: 1152 - RNA, 23 nt, synthetic construct
  source 1..23: mol_type = other RNA
gaggtgcgtcaaacagcgacaag

SEQ ID NO: 1153 - RNA, 23 nt, synthetic construct
  source 1..23: mol_type = other RNA
aggtgcgtcaaacagcgacaagt

SEQ ID NO: 1154 - RNA, 23 nt, synthetic construct
  source 1..23: mol_type = other RNA
ggtgcgtcaaacagcgacaagtt

SEQ ID NO: 1155 - RNA, 23 nt, synthetic construct
  source 1..23: mol_type = other RNA
gtgcgtcaaacagcgacaagttc

SEQ ID NO: 1156 - RNA, 23 nt, synthetic construct
  source 1..23: mol_type = other RNA
tgcgtcaaacagcgacaagttcc

SEQ ID NO: 1157 - RNA, 23 nt, synthetic construct
  source 1..23: mol_type = other RNA
gcgtcaaacagcgacaagttccg

SEQ ID NO: 1158 - RNA, 23 nt, synthetic construct
  source 1..23: mol_type = other RNA
cgtcaaacagcgacaagttccgc

SEQ ID NO: 1159 - RNA, 23 nt, synthetic construct
  source 1..23: mol_type = other RNA
ttccgcccacgtaaaagatgacg

SEQ ID NO: 1160 - RNA, 23 nt, synthetic construct
  source 1..23: mol_type = other RNA
gcccacgtaaaagatgacgcttg

SEQ ID NO: 1161 - RNA, 23 nt, synthetic construct
  source 1..23: mol_type = other RNA
cccacgtaaaagatgacgcttgg

SEQ ID NO: 1162 - RNA, 23 nt, synthetic construct
  source 1..23: mol_type = other RNA
ccacgtaaaagatgacgcttggt

SEQ ID NO: 1163 - RNA, 23 nt, synthetic construct
  source 1..23: mol_type = other RNA
cacgtaaaagatgacgcttggtg

SEQ ID NO: 1164 - RNA, 23 nt, synthetic construct
  source 1..23: mol_type = other RNA
acgtaaaagatgacgcttggtgt

SEQ ID NO: 1165 - RNA, 23 nt, synthetic construct
  source 1..23: mol_type = other RNA
cgtaaaagatgacgcttggtgtg

SEQ ID NO: 1166 - RNA, 23 nt, synthetic construct
  source 1..23: mol_type = other RNA
gtaaaagatgacgcttggtgtgt

SEQ ID NO: 1167 - RNA, 23 nt, synthetic construct
  source 1..23: mol_type = other RNA
taaaagatgacgcttggtgtgtc

SEQ ID NO: 1168 - RNA, 23 nt, synthetic construct
  source 1..23: mol_type = other RNA
aaagatgacgcttggtgtgtcag

SEQ ID NO: 1169 - RNA, 23 nt, synthetic construct
  source 1..23: mol_type = other RNA
agatgacgcttggtgtgtcagcc

SEQ ID NO: 1170 - RNA, 23 nt, synthetic construct
  source 1..23: mol_type = other RNA
atgacgcttggtgtgtcagccgt

SEQ ID NO: 1171 - RNA, 23 nt, synthetic construct
  source 1..23: mol_type = other RNA
ctgctgcccggttgcttctcttt

SEQ ID NO: 1172 - RNA, 23 nt, synthetic construct
  source 1..23: mol_type = other RNA
gggtctagcaagagcaggtgtgg

SEQ ID NO: 1173 - RNA, 23 nt, synthetic construct
  source 1..23: mol_type = other RNA
gagcaggtgtgggtttaggagat

SEQ ID NO: 1174 - RNA, 23 nt, synthetic construct
  source 1..23: mol_type = other RNA
agcaggtgtgggtttaggagata

SEQ ID NO: 1175 - RNA, 23 nt, synthetic construct
  source 1..23: mol_type = other RNA
gcaggtgtgggtttaggagatat

SEQ ID NO: 1176 - RNA, 23 nt, synthetic construct
  source 1..23: mol_type = other RNA
aggtgtgggtttaggagatatct

SEQ ID NO: 1177 - RNA, 23 nt, synthetic construct
  source 1..23: mol_type = other RNA
gagcaggtgtgggtttaggaggt

SEQ ID NO: 1178 - RNA, 23 nt, synthetic construct
  source 1..23: mol_type = other RNA
agcaggtgtgggtttaggaggtg

SEQ ID NO: 1179 - RNA, 23 nt, synthetic construct
  source 1..23: mol_type = other RNA
gcaggtgtgggtttaggaggtgt

SEQ ID NO: 1180 - RNA, 23 nt, synthetic construct
  source 1..23: mol_type = other RNA
aggtgtgggtttaggaggtgtgt

SEQ ID NO: 1181 - RNA, 23 nt, synthetic construct
  source 1..23: mol_type = other RNA
cttgctctcacagtactcgctga

SEQ ID NO: 1182 - RNA, 23 nt, synthetic construct
  source 1..23: mol_type = other RNA
gctctcacagtactcgctgaggg

SEQ ID NO: 1183 - RNA, 23 nt, synthetic construct
  source 1..23: mol_type = other RNA
tctcacagtactcgctgagggtg

SEQ ID NO: 1184 - RNA, 23 nt, synthetic construct
  source 1..23: mol_type = other RNA
tcgctgagggtgaacaagaaaag

SEQ ID NO: 1185 - RNA, 23 nt, synthetic construct
  source 1..23: mol_type = other RNA
acaagaaaagacctgataaagat

SEQ ID NO: 1186 - RNA, 23 nt, synthetic construct
  source 1..23: mol_type = other RNA
caagaaaagacctgataaagatt

SEQ ID NO: 1187 - RNA, 23 nt, synthetic construct
  source 1..23: mol_type = other RNA
aagaaaagacctgataaagatta

SEQ ID NO: 1188 - RNA, 23 nt, synthetic construct
  source 1..23: mol_type = other RNA
agaaaagacctgataaagattaa

SEQ ID NO: 1189 - RNA, 23 nt, synthetic construct
  source 1..23: mol_type = other RNA
gaaaagacctgataaagattaac

SEQ ID NO: 1190 - RNA, 23 nt, synthetic construct
  source 1..23: mol_type = other RNA
aaaagacctgataaagattaacc

SEQ ID NO: 1191 - RNA, 23 nt, synthetic construct
  source 1..23: mol_type = other RNA
aagacctgataaagattaaccag

SEQ ID NO: 1192 - RNA, 23 nt, synthetic construct
  source 1..23: mol_type = other RNA
agacctgataaagattaaccaga

SEQ ID NO: 1193 - RNA, 23 nt, synthetic construct
  source 1..23: mol_type = other RNA
ataaagattaaccagaagaaaac

SEQ ID NO: 1194 - RNA, 23 nt, synthetic construct
  source 1..23: mol_type = other RNA
agattaaccagaagaaaacaagg

SEQ ID NO: 1195 - RNA, 23 nt, synthetic construct
  source 1..23: mol_type = other RNA
ttaaccagaagaaaacaaggagg

SEQ ID NO: 1196 - RNA, 23 nt, synthetic construct
  source 1..23: mol_type = other RNA
aaggagggaaacaaccgcagcct

SEQ ID NO: 1197 - RNA, 23 nt, synthetic construct
  source 1..23: mol_type = other RNA
aggagggaaacaaccgcagcctg

SEQ ID NO: 1198 - RNA, 23 nt, synthetic construct
  source 1..23: mol_type = other RNA
cgcagcctgtagcaagctctgga

SEQ ID NO: 1199 - RNA, 23 nt, synthetic construct
  source 1..23: mol_type = other RNA
agctctggaactcaggagtcgcg

SEQ ID NO: 1200 - RNA, 23 nt, synthetic construct
  source 1..23: mol_type = other RNA
gctctcctcagagctcgacgcat

SEQ ID NO: 1201 - RNA, 23 nt, synthetic construct
  source 1..23: mol_type = other RNA
tctcctcagagctcgacgcattt

SEQ ID NO: 1202 - RNA, 23 nt, synthetic construct
  source 1..23: mol_type = other RNA
ttactttccctctcatttctctg

SEQ ID NO: 1203 - RNA, 23 nt, synthetic construct
  source 1..23: mol_type = other RNA
tactttccctctcatttctctga

SEQ ID NO: 1204 - RNA, 23 nt, synthetic construct
  source 1..23: mol_type = other RNA
actttccctctcatttctctgac

SEQ ID NO: 1205 - RNA, 23 nt, synthetic construct
  source 1..23: mol_type = other RNA
tttccctctcatttctctgaccg

SEQ ID NO: 1206 - RNA, 23 nt, synthetic construct
  source 1..23: mol_type = other RNA
tccctctcatttctctgaccgaa

SEQ ID NO: 1207 - RNA, 23 nt, synthetic construct
  source 1..23: mol_type = other RNA
cctctcatttctctgaccgaagc

SEQ ID NO: 1208 - RNA, 23 nt, synthetic construct
  source 1..23: mol_type = other RNA
ctctcatttctctgaccgaagct

SEQ ID NO: 1209 - RNA, 23 nt, synthetic construct
  source 1..23: mol_type = other RNA
tgggtgtcgggctttcgcctcta

SEQ ID NO: 1210 - RNA, 23 nt, synthetic construct
  source 1..23: mol_type = other RNA
tgtcgggctttcgcctctagcga

SEQ ID NO: 1211 - RNA, 23 nt, synthetic construct
  source 1..23: mol_type = other RNA
ggctttcgcctctagcgactggt

SEQ ID NO: 1212 - RNA, 23 nt, synthetic construct
  source 1..23: mol_type = other RNA
ctttcgcctctagcgactggtgg

SEQ ID NO: 1213 - RNA, 23 nt, synthetic construct
  source 1..23: mol_type = other RNA
ttcgcctctagcgactggtggaa

SEQ ID NO: 1214 - RNA, 23 nt, synthetic construct
  source 1..23: mol_type = other RNA
tcgcctctagcgactggtggaat

SEQ ID NO: 1215 - RNA, 23 nt, synthetic construct
  source 1..23: mol_type = other RNA
gcctctagcgactggtggaattg

SEQ ID NO: 1216 - RNA, 23 nt, synthetic construct
  source 1..23: mol_type = other RNA
cctctagcgactggtggaattgc

SEQ ID NO: 1217 - RNA, 23 nt, synthetic construct
  source 1..23: mol_type = other RNA
gcgactggtggaattgcctgcat

SEQ ID NO: 1218 - RNA, 23 nt, synthetic construct
  source 1..23: mol_type = other RNA
cgactggtggaattgcctgcatc

SEQ ID NO: 1219 - RNA, 23 nt, synthetic construct
  source 1..23: mol_type = other RNA
actggtggaattgcctgcatccg

SEQ ID NO: 1220 - RNA, 23 nt, synthetic construct
  source 1..23: mol_type = other RNA
gatctggcctcttccttgctttc

SEQ ID NO: 1221 - RNA, 23 nt, synthetic construct
  source 1..23: mol_type = other RNA
atctggcctcttccttgctttcc

SEQ ID NO: 1222 - RNA, 23 nt, synthetic construct
  source 1..23: mol_type = other RNA
tctggcctcttccttgctttccc

SEQ ID NO: 1223 - RNA, 23 nt, synthetic construct
  source 1..23: mol_type = other RNA
ctggcctcttccttgctttcccg

SEQ ID NO: 1224 - RNA, 23 nt, synthetic construct
  source 1..23: mol_type = other RNA
tggcctcttccttgctttcccgc

SEQ ID NO: 1225 - RNA, 23 nt, synthetic construct
  source 1..23: mol_type = other RNA
tcttccttgctttcccgccctca

SEQ ID NO: 1226 - RNA, 23 nt, synthetic construct
  source 1..23: mol_type = other RNA
cttccttgctttcccgccctcag

SEQ ID NO: 1227 - RNA, 23 nt, synthetic construct
  source 1..23: mol_type = other RNA
ttccttgctttcccgccctcagt

SEQ ID NO: 1228 - RNA, 23 nt, synthetic construct
  source 1..23: mol_type = other RNA
tccttgctttcccgccctcagta

SEQ ID NO: 1229 - RNA, 23 nt, synthetic construct
  source 1..23: mol_type = other RNA
tcagtacccgagctgtctccttc

SEQ ID NO: 1230 - RNA, 23 nt, synthetic construct
  source 1..23: mol_type = other RNA
agtacccgagctgtctccttccc

SEQ ID NO: 1231 - RNA, 23 nt, synthetic construct
  source 1..23: mol_type = other RNA
gcgaggagatcatgcgggatgag

SEQ ID NO: 1232 - RNA, 23 nt, synthetic construct
  source 1..23: mol_type = other RNA
ggagacgcctgcacaatttcagc

SEQ ID NO: 1233 - RNA, 23 nt, synthetic construct
  source 1..23: mol_type = other RNA
gagacgcctgcacaatttcagcc

SEQ ID NO: 1234 - RNA, 23 nt, synthetic construct
  source 1..23: mol_type = other RNA
gacgcctgcacaatttcagccca

SEQ ID NO: 1235 - RNA, 23 nt, synthetic construct
  source 1..23: mol_type = other RNA
cgcctgcacaatttcagcccaag

SEQ ID NO: 1236 - RNA, 23 nt, synthetic construct
  source 1..23: mol_type = other RNA
gcctgcacaatttcagcccaagc

SEQ ID NO: 1237 - RNA, 23 nt, synthetic construct
  source 1..23: mol_type = other RNA
cctgcacaatttcagcccaagct

SEQ ID NO: 1238 - RNA, 23 nt, synthetic construct
  source 1..23: mol_type = other RNA
cacaatttcagcccaagcttcta

SEQ ID NO: 1239 - RNA, 23 nt, synthetic construct
  source 1..23: mol_type = other RNA
acaatttcagcccaagcttctag

SEQ ID NO: 1240 - RNA, 23 nt, synthetic construct
  source 1..23: mol_type = other RNA
ttcagcccaagcttctagagagt

SEQ ID NO: 1241 - RNA, 23 nt, synthetic construct
  source 1..23: mol_type = other RNA
tcagcccaagcttctagagagtg

SEQ ID NO: 1242 - RNA, 23 nt, synthetic construct
  source 1..23: mol_type = other RNA
cagcccaagcttctagagagtgg

SEQ ID NO: 1243 - RNA, 23 nt, synthetic construct
  source 1..23: mol_type = other RNA
agcccaagcttctagagagtggt

SEQ ID NO: 1244 - RNA, 23 nt, synthetic construct
  source 1..23: mol_type = other RNA
gcccaagcttctagagagtggtg

SEQ ID NO: 1245 - RNA, 23 nt, synthetic construct
  source 1..23: mol_type = other RNA
cccaagcttctagagagtggtga

SEQ ID NO: 1246 - RNA, 23 nt, synthetic construct
  source 1..23: mol_type = other RNA
ccaagcttctagagagtggtgat

SEQ ID NO: 1247 - RNA, 23 nt, synthetic construct
  source 1..23: mol_type = other RNA
caagcttctagagagtggtgatg

SEQ ID NO: 1248 - RNA, 23 nt, synthetic construct
  source 1..23: mol_type = other RNA
aagcttctagagagtggtgatga

SEQ ID NO: 1249 - RNA, 23 nt, synthetic construct
  source 1..23: mol_type = other RNA
gcttctagagagtggtgatgact

SEQ ID NO: 1250 - RNA, 23 nt, synthetic construct
  source 1..23: mol_type = other RNA
tctagagagtggtgatgacttgc

SEQ ID NO: 1251 - RNA, 23 nt, synthetic construct
  source 1..23: mol_type = other RNA
ctagagagtggtgatgacttgca

SEQ ID NO: 1252 - RNA, 23 nt, synthetic construct
  source 1..23: mol_type = other RNA
tagagagtggtgatgacttgcat

SEQ ID NO: 1253 - RNA, 23 nt, synthetic construct
  source 1..23: mol_type = other RNA
agagtggtgatgacttgcatatg

SEQ ID NO: 1254 - RNA, 23 nt, synthetic construct
  source 1..23: mol_type = other RNA
gtggtgatgacttgcatatgagg

SEQ ID NO: 1255 - RNA, 23 nt, synthetic construct
  source 1..23: mol_type = other RNA
tggtgatgacttgcatatgaggg

SEQ ID NO: 1256 - RNA, 23 nt, synthetic construct
  source 1..23: mol_type = other RNA
ggtgatgacttgcatatgagggc

SEQ ID NO: 1257 - RNA, 23 nt, synthetic construct
  source 1..23: mol_type = other RNA
tgagggcagcaatgcaagtcggt

SEQ ID NO: 1258 - RNA, 23 nt, synthetic construct
  source 1..23: mol_type = other RNA
gagggcagcaatgcaagtcggtg

SEQ ID NO: 1259 - RNA, 23 nt, synthetic construct
  source 1..23: mol_type = other RNA
agggcagcaatgcaagtcggtgt

SEQ ID NO: 1260 - RNA, 23 nt, synthetic construct
  source 1..23: mol_type = other RNA
gggcagcaatgcaagtcggtgtg

SEQ ID NO: 1261 - RNA, 23 nt, synthetic construct
  source 1..23: mol_type = other RNA
ggcagcaatgcaagtcggtgtgc

SEQ ID NO: 1262 - RNA, 23 nt, synthetic construct
  source 1..23: mol_type = other RNA
agcaatgcaagtcggtgtgctcc

SEQ ID NO: 1263 - RNA, 23 nt, synthetic construct
  source 1..23: mol_type = other RNA
ttctgtgggacatgacctggttg

SEQ ID NO: 1264 - RNA, 23 nt, synthetic construct
  source 1..23: mol_type = other RNA
tctgtgggacatgacctggttgc

SEQ ID NO: 1265 - RNA, 23 nt, synthetic construct
  source 1..23: mol_type = other RNA
ctgtgggacatgacctggttgct

SEQ ID NO: 1266 - RNA, 23 nt, synthetic construct
  source 1..23: mol_type = other RNA
tgtgggacatgacctggttgctt

SEQ ID NO: 1267 - RNA, 23 nt, synthetic construct
  source 1..23: mol_type = other RNA
gggacatgacctggttgcttcac

SEQ ID NO: 1268 - RNA, 23 nt, synthetic construct
  source 1..23: mol_type = other RNA
ggacatgacctggttgcttcaca

SEQ ID NO: 1269 - RNA, 23 nt, synthetic construct
  source 1..23: mol_type = other RNA
catgacctggttgcttcacagct

SEQ ID NO: 1270 - RNA, 23 nt, synthetic construct
  source 1..23: mol_type = other RNA
atgacctggttgcttcacagctc

SEQ ID NO: 1271 - RNA, 23 nt, synthetic construct
  source 1..23: mol_type = other RNA
tgacctggttgcttcacagctcc

SEQ ID NO: 1272 - RNA, 23 nt, synthetic construct
  source 1..23: mol_type = other RNA
gacctggttgcttcacagctccg

SEQ ID NO: 1273 - RNA, 23 nt, synthetic construct
  source 1..23: mol_type = other RNA
acctggttgcttcacagctccga

SEQ ID NO: 1274 - RNA, 23 nt, synthetic construct
  source 1..23: mol_type = other RNA
cctggttgcttcacagctccgag

SEQ ID NO: 1275 - RNA, 23 nt, synthetic construct
  source 1..23: mol_type = other RNA
ctggttgcttcacagctccgaga

SEQ ID NO: 1276 - RNA, 23 nt, synthetic construct
  source 1..23: mol_type = other RNA
tggttgcttcacagctccgagat

SEQ ID NO: 1277 - RNA, 23 nt, synthetic construct
  source 1..23: mol_type = other RNA
ggttgcttcacagctccgagatg

SEQ ID NO: 1278 - RNA, 23 nt, synthetic construct
  source 1..23: mol_type = other RNA
cacagctccgagatgacacagac

SEQ ID NO: 1279 - RNA, 23 nt, synthetic construct
  source 1..23: mol_type = other RNA
cagctccgagatgacacagactt

SEQ ID NO: 1280 - RNA, 23 nt, synthetic construct
  source 1..23: mol_type = other RNA
agctccgagatgacacagacttg

SEQ ID NO: 1281 - RNA, 23 nt, synthetic construct
  source 1..23: mol_type = other RNA
gctccgagatgacacagacttgc

SEQ ID NO: 1282 - RNA, 23 nt, synthetic construct
  source 1..23: mol_type = other RNA
ctccgagatgacacagacttgct

SEQ ID NO: 1283 - RNA, 23 nt, synthetic construct
  source 1..23: mol_type = other RNA
tccgagatgacacagacttgctt

SEQ ID NO: 1284 - RNA, 23 nt, synthetic construct
  source 1..23: mol_type = other RNA
ccgagatgacacagacttgctta

SEQ ID NO: 1285 - RNA, 23 nt, synthetic construct
  source 1..23: mol_type = other RNA
gagatgacacagacttgcttaaa

SEQ ID NO: 1286 - RNA, 23 nt, synthetic construct
  source 1..23: mol_type = other RNA
agatgacacagacttgcttaaag

SEQ ID NO: 1287 - RNA, 23 nt, synthetic construct
  source 1..23: mol_type = other RNA
gatgacacagacttgcttaaagg

SEQ ID NO: 1288 - RNA, 23 nt, synthetic construct
  source 1..23: mol_type = other RNA
atgacacagacttgcttaaagga

SEQ ID NO: 1289 - RNA, 23 nt, synthetic construct
  source 1..23: mol_type = other RNA
tgacacagacttgcttaaaggaa

SEQ ID NO: 1290 - RNA, 23 nt, synthetic construct
  source 1..23: mol_type = other RNA
cacagacttgcttaaaggaagtg

SEQ ID NO: 1291 - RNA, 23 nt, synthetic construct
  source 1..23: mol_type = other RNA
acagacttgcttaaaggaagtga

SEQ ID NO: 1292 - RNA, 23 nt, synthetic construct
  source 1..23: mol_type = other RNA
tcagcgagtactgtgagagcaag

SEQ ID NO: 1293 - RNA, 21 nt, synthetic construct
  source 1..21: mol_type = other RNA
  modified_base 1: mod_base = OTHER; note = 2'-O-methyladenosine-3'-phosphorothioate
  modified_base 2: mod_base = OTHER; note = 2'-O-methyladenosine-3'-phosphorothioate
  modified_base 3: mod_base = OTHER; note = 2'-O-methylcytidine-3'-phosphate
  modified_base 4: mod_base = OTHER; note = 2'-O-methyladenosine-3'-phosphate
  modified_base 5: mod_base = OTHER; note = 2'-O-methylguanosine-3'-phosphate
  modified_base 6: mod_base = OTHER; note = 2'-O-methyluridine-3'-phosphate
  modified_base 7: mod_base = OTHER; note = 2'-deoxy-2'-fluoroguanosine-3'-phosphate
  modified_base 8: mod_base = OTHER; note = 2'-O-methyluridine-3'-phosphate
  modified_base 9: mod_base = OTHER; note = 2'-deoxy-2'-fluorouridine-3'-phosphate
  modified_base 10: mod_base = OTHER; note = 2'-deoxy-2'-fluorocytidine-3'-phosphate
  modified_base 11: mod_base = OTHER; note = 2'-deoxy-2'-fluorouridine-3'-phosphate
  modified_base 12: mod_base = OTHER; note = 2'-O-methyluridine-3'-phosphate
  modified_base 13: mod_base = OTHER; note = 2'-O-methylguanosine-3'-phosphate
  modified_base 14: mod_base = OTHER; note = 2'-O-methylcytidine-3'-phosphate
  modified_base 15: mod_base = OTHER; note = 2'-O-methyluridine-3'-phosphate
  modified_base 16: mod_base = OTHER; note = 2'-O-methylcytidine-3'-phosphate
  modified_base 17: mod_base = OTHER; note = 2'-O-methyluridine-3'-phosphate
  modified_base 18: mod_base = OTHER; note = 2'-O-methyladenosine-3'-phosphate
  modified_base 19: mod_base = OTHER; note = 2'-O-methyluridine-3'-phosphate
  modified_base 20: mod_base = OTHER; note = 2'-O-methyladenosine-3'-phosphate
  modified_base 21: mod_base = OTHER; note = 2'-O-methyladenosine-3'-phosphate ((2S,4R)-1-[29-[[2-(acetylamino)-2-deoxy-beta-D-galactopyra nosyl]oxy]-14,14-bis[[3-[[3-[[5-[[2-(acetylamino)-2-deoxy-b eta-D-galactopyranosyl]oxy]-1-oxopentyl]amino]propyl]amino] -3-oxopropoxy]methyl]-1,12,19,25-tetraoxo-16-oxa-13,20,24-t riazanonacos-1-yl]-4-hydroxy-2-pyrrolidinyl)methyl ester
aacagtgttcttgctctataa

SEQ ID NO: 1294 - RNA, 21 nt, synthetic construct
  source 1..21: mol_type = other RNA
acaagaaaagacctgataaat

SEQ ID NO: 1295 - RNA, 21 nt, synthetic construct
  source 1..21: mol_type = other RNA
agaaaagacctgataaagatt

SEQ ID NO: 1296 - RNA, 21 nt, synthetic construct
  source 1..21: mol_type = other RNA
aaagacctgataaagattaat

SEQ ID NO: 1297 - RNA, 21 nt, synthetic construct
  source 1..21: mol_type = other RNA
ctgataaagattaaccagaat

SEQ ID NO: 1298 - RNA, 21 nt, synthetic construct
  source 1..21: mol_type = other RNA
gataaagattaaccagaagaa

SEQ ID NO: 1299 - RNA, 21 nt, synthetic construct
  source 1..21: mol_type = other RNA
ataaagattaaccagaagaaa

SEQ ID NO: 1300 - RNA, 21 nt, synthetic construct
  source 1..21: mol_type = other RNA
aaagattaaccagaagaaaat

SEQ ID NO: 1301 - RNA, 21 nt, synthetic construct
  source 1..21: mol_type = other RNA
taaccagaagaaaacaaggat

SEQ ID NO: 1302 - RNA, 23 nt, synthetic construct
  source 1..23: mol_type = other RNA
atttatcaggtcttttcttgttc

SEQ ID NO: 1303 - RNA, 23 nt, synthetic construct
  source 1..23: mol_type = other RNA
attaatctttatcaggtcttttc

SEQ ID NO: 1304 - RNA, 23 nt, synthetic construct
  source 1..23: mol_type = other RNA
attctggttaatctttatcaggt

SEQ ID NO: 1305 - RNA, 23 nt, synthetic construct
  source 1..23: mol_type = other RNA
attttcttctggttaatctttat

SEQ ID NO: 1306 - RNA, 23 nt, synthetic construct
  source 1..23: mol_type = other RNA
atccttgttttcttctggttaat

SEQ ID NO: 1307 - RNA, 21 nt, synthetic construct
  source 1..21: mol_type = other RNA
  modified_base 1: mod_base = OTHER; note = 2'-O-methyladenosine-3'-phosphorothioate
  modified_base 2: mod_base = OTHER; note = 2'-O-methylcytidine-3'-phosphorothioate
  modified_base 3: mod_base = OTHER; note = 2'-O-methyladenosine-3'-phosphate
  modified_base 4: mod_base = OTHER; note = 2'-O-methyladenosine-3'-phosphate
  modified_base 5: mod_base = OTHER; note = 2'-O-methylguanosine-3'-phosphate
  modified_base 6: mod_base = OTHER; note = 2'-O-methyladenosine-3'-phosphate
  modified_base 7: mod_base = OTHER; note = 2'-deoxy-2'-fluoroadenosine-3'-phosphate
  modified_base 8: mod_base = OTHER; note = 2'-O-methyladenosine-3'-phosphate
  modified_base 9: mod_base = OTHER; note = 2'-deoxy-2'-fluoroadenosine-3'-phosphate
  modified_base 10: mod_base = OTHER; note = 2'-deoxy-2'-fluoroguanosine-3'-phosphate
  modified_base 11: mod_base = OTHER; note = 2'-deoxy-2'-fluoroadenosine-3'-phosphate
  modified_base 12: mod_base = OTHER; note = 2'-O-methylcytidine-3'-phosphate
  modified_base 13: mod_base = OTHER; note = 2'-O-methylcytidine-3'-phosphate
  modified_base 14: mod_base = OTHER; note = 2'-O-methyluridine-3'-phosphate
  modified_base 15: mod_base = OTHER; note = 2'-O-methylguanosine-3'-phosphate
  modified_base 16: mod_base = OTHER; note = 2'-O-methyladenosine-3'-phosphate
  modified_base 17: mod_base = OTHER; note = 2'-O-methyluridine-3'-phosphate
  modified_base 18: mod_base = OTHER; note = 2'-O-methyladenosine-3'-phosphate
  modified_base 19: mod_base = OTHER; note = 2'-O-methyladenosine-3'-phosphate
  modified_base 20: mod_base = OTHER; note = 2'-O-methyladenosine-3'-phosphate
  modified_base 21: mod_base = OTHER; note = 2'-O-methyluridine-3'-phosphate ((2S,4R)-1-[29-[[2-(acetylamino)-2-deoxy-beta-D-galactopyra nosyl]oxy]-14,14-bis[[3-[[3-[[5-[[2-(acetylamino)-2-deoxy-b eta-D-galactopyranosyl]oxy]-1-oxopentyl]amino]propyl]amino] -3-oxopropoxy]methyl]-1,12,19,25-tetraoxo-16-oxa-13,20,24-t riazanonacos-1-yl]-4-hydroxy-2-pyrrolidinyl)methyl ester
acaagaaaagacctgataaat

SEQ ID NO: 1308 - RNA, 21 nt, synthetic construct
  source 1..21: mol_type = other RNA
  modified_base 1: mod_base = OTHER; note = 2'-O-methyladenosine-3'-phosphorothioate
  modified_base 2: mod_base = OTHER; note = 2'-O-methylguanosine-3'-phosphorothioate
  modified_base 3: mod_base = OTHER; note = 2'-O-methyladenosine-3'-phosphate
  modified_base 4: mod_base = OTHER; note = 2'-O-methyladenosine-3'-phosphate
  modified_base 5: mod_base = OTHER; note = 2'-O-methyladenosine-3'-phosphate
  modified_base 6: mod_base = OTHER; note = 2'-O-methyladenosine-3'-phosphate
  modified_base 7: mod_base = OTHER; note = 2'-deoxy-2'-fluoroguanosine-3'-phosphate
  modified_base 8: mod_base = OTHER; note = 2'-O-methyladenosine-3'-phosphate
  modified_base 9: mod_base = OTHER; note = 2'-deoxy-2'-fluorocytidine-3'-phosphate
  modified_base 10: mod_base = OTHER; note = 2'-deoxy-2'-fluorocytidine-3'-phosphate
  modified_base 11: mod_base = OTHER; note = 2'-deoxy-2'-fluorouridine-3'-phosphate
  modified_base 12: mod_base = OTHER; note = 2'-O-methylguanosine-3'-phosphate
  modified_base 13: mod_base = OTHER; note = 2'-O-methyladenosine-3'-phosphate
  modified_base 14: mod_base = OTHER; note = 2'-O-methyluridine-3'-phosphate
  modified_base 15: mod_base = OTHER; note = 2'-O-methyladenosine-3'-phosphate
  modified_base 16: mod_base = OTHER; note = 2'-O-methyladenosine-3'-phosphate
  modified_base 17: mod_base = OTHER; note = 2'-O-methyladenosine-3'-phosphate
  modified_base 18: mod_base = OTHER; note = 2'-O-methylguanosine-3'-phosphate
  modified_base 19: mod_base = OTHER; note = 2'-O-methyladenosine-3'-phosphate
  modified_base 20: mod_base = OTHER; note = 2'-O-methyluridine-3'-phosphate
  modified_base 21: mod_base = OTHER; note = 2'-O-methyluridine-3'-phosphate ((2S,4R)-1-[29-[[2-(acetylamino)-2-deoxy-beta-D-galactopyra nosyl]oxy]-14,14-bis[[3-[[3-[[5-[[2-(acetylamino)-2-deoxy-b eta-D-galactopyranosyl]oxy]-1-oxopentyl]amino]propyl]amino] -3-oxopropoxy]methyl]-1,12,19,25-tetraoxo-16-oxa-13,20,24-t riazanonacos-1-yl]-4-hydroxy-2-pyrrolidinyl)methyl ester
agaaaagacctgataaagatt

SEQ ID NO: 1309 - RNA, 21 nt, synthetic construct
  source 1..21: mol_type = other RNA
  modified_base 1: mod_base = OTHER; note = 2'-O-methyladenosine-3'-phosphorothioate
  modified_base 2: mod_base = OTHER; note = 2'-O-methyladenosine-3'-phosphorothioate
  modified_base 3: mod_base = OTHER; note = 2'-O-methyladenosine-3'-phosphate
  modified_base 4: mod_base = OTHER; note = 2'-O-methyladenosine-3'-phosphate
  modified_base 5: mod_base = OTHER; note = 2'-O-methylguanosine-3'-phosphate
  modified_base 6: mod_base = OTHER; note = 2'-O-methyladenosine-3'-phosphate
  modified_base 7: mod_base = OTHER; note = 2'-deoxy-2'-fluorocytidine-3'-phosphate
  modified_base 8: mod_base = OTHER; note = 2'-O-methylcytidine-3'-phosphate
  modified_base 9: mod_base = OTHER; note = 2'-deoxy-2'-fluorouridine-3'-phosphate
  modified_base 10: mod_base = OTHER; note = 2'-deoxy-2'-fluoroguanosine-3'-phosphate
  modified_base 11: mod_base = OTHER; note = 2'-deoxy-2'-fluoroadenosine-3'-phosphate
  modified_base 12: mod_base = OTHER; note = 2'-O-methyluridine-3'-phosphate
  modified_base 13: mod_base = OTHER; note = 2'-O-methyladenosine-3'-phosphate
  modified_base 14: mod_base = OTHER; note = 2'-O-methyladenosine-3'-phosphate
  modified_base 15: mod_base = OTHER; note = 2'-O-methyladenosine-3'-phosphate
  modified_base 16: mod_base = OTHER; note = 2'-O-methylguanosine-3'-phosphate
  modified_base 17: mod_base = OTHER; note = 2'-O-methyladenosine-3'-phosphate
  modified_base 18: mod_base = OTHER; note = 2'-O-methyluridine-3'-phosphate
  modified_base 19: mod_base = OTHER; note = 2'-O-methyluridine-3'-phosphate
  modified_base 20: mod_base = OTHER; note = 2'-O-methyladenosine-3'-phosphate
  modified_base 21: mod_base = OTHER; note = 2'-O-methyladenosine-3'-phosphate ((2S,4R)-1-[29-[[2-(acetylamino)-2-deoxy-beta-D-galactopyra nosyl]oxy]-14,14-bis[[3-[[3-[[5-[[2-(acetylamino)-2-deoxy-b eta-D-galactopyranosyl]oxy]-1-oxopentyl]amino]propyl]amino] -3-oxopropoxy]methyl]-1,12,19,25-tetraoxo-16-oxa-13,20,24-t riazanonacos-1-yl]-4-hydroxy-2-pyrrolidinyl)methyl ester
aaaagacctgataaagattaa

SEQ ID NO: 1310 - RNA, 21 nt, synthetic construct
  source 1..21: mol_type = other RNA
  modified_base 1: mod_base = OTHER; note = 2'-O-methyladenosine-3'-phosphorothioate
  modified_base 2: mod_base = OTHER; note = 2'-O-methyladenosine-3'-phosphorothioate
  modified_base 3: mod_base = OTHER; note = 2'-O-methyladenosine-3'-phosphate
  modified_base 4: mod_base = OTHER; note = 2'-O-methylguanosine-3'-phosphate
  modified_base 5: mod_base = OTHER; note = 2'-O-methyladenosine-3'-phosphate
  modified_base 6: mod_base = OTHER; note = 2'-O-methylcytidine-3'-phosphate
  modified_base 7: mod_base = OTHER; note = 2'-deoxy-2'-fluorocytidine-3'-phosphate
  modified_base 8: mod_base = OTHER; note = 2'-O-methyluridine-3'-phosphate
  modified_base 9: mod_base = OTHER; note = 2'-deoxy-2'-fluoroguanosine-3'-phosphate
  modified_base 10: mod_base = OTHER; note = 2'-deoxy-2'-fluoroadenosine-3'-phosphate
  modified_base 11: mod_base = OTHER; note = 2'-deoxy-2'-fluorouridine-3'-phosphate
  modified_base 12: mod_base = OTHER; note = 2'-O-methyladenosine-3'-phosphate
  modified_base 13: mod_base = OTHER; note = 2'-O-methyladenosine-3'-phosphate
  modified_base 14: mod_base = OTHER; note = 2'-O-methyladenosine-3'-phosphate
  modified_base 15: mod_base = OTHER; note = 2'-O-methylguanosine-3'-phosphate
  modified_base 16: mod_base = OTHER; note = 2'-O-methyladenosine-3'-phosphate
  modified_base 17: mod_base = OTHER; note = 2'-O-methyluridine-3'-phosphate
  modified_base 18: mod_base = OTHER; note = 2'-O-methyluridine-3'-phosphate
  modified_base 19: mod_base = OTHER; note = 2'-O-methyladenosine-3'-phosphate
  modified_base 20: mod_base = OTHER; note = 2'-O-methyladenosine-3'-phosphate
  modified_base 21: mod_base = OTHER; note = 2'-O-methyluridine-3'-phosphate ((2S,4R)-1-[29-[[2-(acetylamino)-2-deoxy-beta-D-galactopyra nosyl]oxy]-14,14-bis[[3-[[3-[[5-[[2-(acetylamino)-2-deoxy-b eta-D-galactopyranosyl]oxy]-1-oxopentyl]amino]propyl]amino] -3-oxopropoxy]methyl]-1,12,19,25-tetraoxo-16-oxa-13,20,24-t riazanonacos-1-yl]-4-hydroxy-2-pyrrolidinyl)methyl ester
aaagacctgataaagattaat

SEQ ID NO: 1311 - RNA, 21 nt, synthetic construct
  source 1..21: mol_type = other RNA
  modified_base 1: mod_base = OTHER; note = 2'-O-methylcytidine-3'-phosphorothioate
  modified_base 2: mod_base = OTHER; note = 2'-O-methyluridine-3'-phosphorothioate
  modified_base 3: mod_base = OTHER; note = 2'-O-methylguanosine-3'-phosphate
  modified_base 4: mod_base = OTHER; note = 2'-O-methyladenosine-3'-phosphate
  modified_base 5: mod_base = OTHER; note = 2'-O-methyluridine-3'-phosphate
  modified_base 6: mod_base = OTHER; note = 2'-O-methyladenosine-3'-phosphate
  modified_base 7: mod_base = OTHER; note = 2'-deoxy-2'-fluoroadenosine-3'-phosphate
  modified_base 8: mod_base = OTHER; note = 2'-O-methyladenosine-3'-phosphate
  modified_base 9: mod_base = OTHER; note = 2'-deoxy-2'-fluoroguanosine-3'-phosphate
  modified_base 10: mod_base = OTHER; note = 2'-deoxy-2'-fluoroadenosine-3'-phosphate
  modified_base 11: mod_base = OTHER; note = 2'-deoxy-2'-fluorouridine-3'-phosphate
  modified_base 12: mod_base = OTHER; note = 2'-O-methyluridine-3'-phosphate
  modified_base 13: mod_base = OTHER; note = 2'-O-methyladenosine-3'-phosphate
  modified_base 14: mod_base = OTHER; note = 2'-O-methyladenosine-3'-phosphate
  modified_base 15: mod_base = OTHER; note = 2'-O-methylcytidine-3'-phosphate
  modified_base 16: mod_base = OTHER; note = 2'-O-methylcytidine-3'-phosphate
  modified_base 17: mod_base = OTHER; note = 2'-O-methyladenosine-3'-phosphate
  modified_base 18: mod_base = OTHER; note = 2'-O-methylguanosine-3'-phosphate
  modified_base 19: mod_base = OTHER; note = 2'-O-methyladenosine-3'-phosphate
  modified_base 20: mod_base = OTHER; note = 2'-O-methyladenosine-3'-phosphate
  modified_base 21: mod_base = OTHER; note = 2'-O-methyluridine-3'-phosphate ((2S,4R)-1-[29-[[2-(acetylamino)-2-deoxy-beta-D-galactopyra nosyl]oxy]-14,14-bis[[3-[[3-[[5-[[2-(acetylamino)-2-deoxy-b eta-D-galactopyranosyl]oxy]-1-oxopentyl]amino]propyl]amino] -3-oxopropoxy]methyl]-1,12,19,25-tetraoxo-16-oxa-13,20,24-t riazanonacos-1-yl]-4-hydroxy-2-pyrrolidinyl)methyl ester
ctgataaagattaaccagaat

SEQ ID NO: 1312 - RNA, 21 nt, synthetic construct
  source 1..21: mol_type = other RNA
  modified_base 1: mod_base = OTHER; note = 2'-O-methylguanosine-3'-phosphorothioate
  modified_base 2: mod_base = OTHER; note = 2'-O-methyladenosine-3'-phosphorothioate
  modified_base 3: mod_base = OTHER; note = 2'-O-methyluridine-3'-phosphate
  modified_base 4: mod_base = OTHER; note = 2'-O-methyladenosine-3'-phosphate
  modified_base 5: mod_base = OTHER; note = 2'-O-methyladenosine-3'-phosphate
  modified_base 6: mod_base = OTHER; note = 2'-O-methyladenosine-3'-phosphate
  modified_base 7: mod_base = OTHER; note = 2'-deoxy-2'-fluoroguanosine-3'-phosphate
  modified_base 8: mod_base = OTHER; note = 2'-O-methyladenosine-3'-phosphate
  modified_base 9: mod_base = OTHER; note = 2'-deoxy-2'-fluorouridine-3'-phosphate
  modified_base 10: mod_base = OTHER; note = 2'-deoxy-2'-fluorouridine-3'-phosphate
  modified_base 11: mod_base = OTHER; note = 2'-deoxy-2'-fluoroadenosine-3'-phosphate
  modified_base 12: mod_base = OTHER; note = 2'-O-methyladenosine-3'-phosphate
  modified_base 13: mod_base = OTHER; note = 2'-O-methylcytidine-3'-phosphate
  modified_base 14: mod_base = OTHER; note = 2'-O-methylcytidine-3'-phosphate
  modified_base 15: mod_base = OTHER; note = 2'-O-methyladenosine-3'-phosphate
  modified_base 16: mod_base = OTHER; note = 2'-O-methylguanosine-3'-phosphate
  modified_base 17: mod_base = OTHER; note = 2'-O-methyladenosine-3'-phosphate
  modified_base 18: mod_base = OTHER; note = 2'-O-methyladenosine-3'-phosphate
  modified_base 19: mod_base = OTHER; note = 2'-O-methylguanosine-3'-phosphate
  modified_base 20: mod_base = OTHER; note = 2'-O-methyladenosine-3'-phosphate
  modified_base 21: mod_base = OTHER; note = 2'-O-methyladenosine-3'-phosphate ((2S,4R)-1-[29-[[2-(acetylamino)-2-deoxy-beta-D-galactopyra nosyl]oxy]-14,14-bis[[3-[[3-[[5-[[2-(acetylamino)-2-deoxy-b eta-D-galactopyranosyl]oxy]-1-oxopentyl]amino]propyl]amino] -3-oxopropoxy]methyl]-1,12,19,25-tetraoxo-16-oxa-13,20,24-t riazanonacos-1-yl]-4-hydroxy-2-pyrrolidinyl)methyl ester
gataaagattaaccagaagaa

SEQ ID NO: 1313 - RNA, 21 nt, synthetic construct
  source 1..21: mol_type = other RNA
  modified_base 1: mod_base = OTHER; note = 2'-O-methyladenosine-3'-phosphorothioate
  modified_base 2: mod_base = OTHER; note = 2'-O-methyluridine-3'-phosphorothioate
  modified_base 3: mod_base = OTHER; note = 2'-O-methyladenosine-3'-phosphate
  modified_base 4: mod_base = OTHER; note = 2'-O-methyladenosine-3'-phosphate
  modified_base 5: mod_base = OTHER; note = 2'-O-methyladenosine-3'-phosphate
  modified_base 6: mod_base = OTHER; note = 2'-O-methylguanosine-3'-phosphate
  modified_base 7: mod_base = OTHER; note = 2'-deoxy-2'-fluoroadenosine-3'-phosphate
  modified_base 8: mod_base = OTHER; note = 2'-O-methyluridine-3'-phosphate
  modified_base 9: mod_base = OTHER; note = 2'-deoxy-2'-fluorouridine-3'-phosphate
  modified_base 10: mod_base = OTHER; note = 2'-deoxy-2'-fluoroadenosine-3'-phosphate
  modified_base 11: mod_base = OTHER; note = 2'-deoxy-2'-fluoroadenosine-3'-phosphate
  modified_base 12: mod_base = OTHER; note = 2'-O-methylcytidine-3'-phosphate
  modified_base 13: mod_base = OTHER; note = 2'-O-methylcytidine-3'-phosphate
  modified_base 14: mod_base = OTHER; note = 2'-O-methyladenosine-3'-phosphate
  modified_base 15: mod_base = OTHER; note = 2'-O-methylguanosine-3'-phosphate
  modified_base 16: mod_base = OTHER; note = 2'-O-methyladenosine-3'-phosphate
  modified_base 17: mod_base = OTHER; note = 2'-O-methyladenosine-3'-phosphate
  modified_base 18: mod_base = OTHER; note = 2'-O-methylguanosine-3'-phosphate
  modified_base 19: mod_base = OTHER; note = 2'-O-methyladenosine-3'-phosphate
  modified_base 20: mod_base = OTHER; note = 2'-O-methyladenosine-3'-phosphate
  modified_base 21: mod_base = OTHER; note = 2'-O-methyladenosine-3'-phosphate ((2S,4R)-1-[29-[[2-(acetylamino)-2-deoxy-beta-D-galactopyra nosyl]oxy]-14,14-bis[[3-[[3-[[5-[[2-(acetylamino)-2-deoxy-b eta-D-galactopyranosyl]oxy]-1-oxopentyl]amino]propyl]amino] -3-oxopropoxy]methyl]-1,12,19,25-tetraoxo-16-oxa-13,20,24-t riazanonacos-1-yl]-4-hydroxy-2-pyrrolidinyl)methyl ester
ataaagattaaccagaagaaa

SEQ ID NO: 1314 - RNA, 21 nt, synthetic construct
  source 1..21: mol_type = other RNA
  modified_base 1: mod_base = OTHER; note = 2'-O-methyladenosine-3'-phosphorothioate
  modified_base 2: mod_base = OTHER; note = 2'-O-methyladenosine-3'-phosphorothioate
  modified_base 3: mod_base = OTHER; note = 2'-O-methyladenosine-3'-phosphate
  modified_base 4: mod_base = OTHER; note = 2'-O-methylguanosine-3'-phosphate
  modified_base 5: mod_base = OTHER; note = 2'-O-methyladenosine-3'-phosphate
  modified_base 6: mod_base = OTHER; note = 2'-O-methyluridine-3'-phosphate
  modified_base 7: mod_base = OTHER; note = 2'-deoxy-2'-fluorouridine-3'-phosphate
  modified_base 8: mod_base = OTHER; note = 2'-O-methyladenosine-3'-phosphate
  modified_base 9: mod_base = OTHER; note = 2'-deoxy-2'-fluoroadenosine-3'-phosphate
  modified_base 10: mod_base = OTHER; note = 2'-deoxy-2'-fluorocytidine-3'-phosphate
  modified_base 11: mod_base = OTHER; note = 2'-deoxy-2'-fluorocytidine-3'-phosphate
  modified_base 12: mod_base = OTHER; note = 2'-O-methyladenosine-3'-phosphate
  modified_base 13: mod_base = OTHER; note = 2'-O-methylguanosine-3'-phosphate
  modified_base 14: mod_base = OTHER; note = 2'-O-methyladenosine-3'-phosphate
  modified_base 15: mod_base = OTHER; note = 2'-O-methyladenosine-3'-phosphate
  modified_base 16: mod_base = OTHER; note = 2'-O-methylguanosine-3'-phosphate
  modified_base 17: mod_base = OTHER; note = 2'-O-methyladenosine-3'-phosphate
  modified_base 18: mod_base = OTHER; note = 2'-O-methyladenosine-3'-phosphate
  modified_base 19: mod_base = OTHER; note = 2'-O-methyladenosine-3'-phosphate
  modified_base 20: mod_base = OTHER; note = 2'-O-methyladenosine-3'-phosphate
  modified_base 21: mod_base = OTHER; note = 2'-O-methyluridine-3'-phosphate ((2S,4R)-1-[29-[[2-(acetylamino)-2-deoxy-beta-D-galactopyra nosyl]oxy]-14,14-bis[[3-[[3-[[5-[[2-(acetylamino)-2-deoxy-b eta-D-galactopyranosyl]oxy]-1-oxopentyl]amino]propyl]amino] -3-oxopropoxy]methyl]-1,12,19,25-tetraoxo-16-oxa-13,20,24-t riazanonacos-1-yl]-4-hydroxy-2-pyrrolidinyl)methyl ester
aaagattaaccagaagaaaat

SEQ ID NO: 1315 - RNA, 21 nt, synthetic construct
  source 1..21: mol_type = other RNA
  modified_base 1: mod_base = OTHER; note = 2'-O-methyluridine-3'-phosphorothioate
  modified_base 2: mod_base = OTHER; note = 2'-O-methyladenosine-3'-phosphorothioate
  modified_base 3: mod_base = OTHER; note = 2'-O-methyladenosine-3'-phosphate
  modified_base 4: mod_base = OTHER; note = 2'-O-methylcytidine-3'-phosphate
  modified_base 5: mod_base = OTHER; note = 2'-O-methylcytidine-3'-phosphate
  modified_base 6: mod_base = OTHER; note = 2'-O-methyladenosine-3'-phosphate
  modified_base 7: mod_base = OTHER; note = 2'-deoxy-2'-fluoroguanosine-3'-phosphate
  modified_base 8: mod_base = OTHER; note = 2'-O-methyladenosine-3'-phosphate
  modified_base 9: mod_base = OTHER; note = 2'-deoxy-2'-fluoroadenosine-3'-phosphate
  modified_base 10: mod_base = OTHER; note = 2'-deoxy-2'-fluoroguanosine-3'-phosphate
  modified_base 11: mod_base = OTHER; note = 2'-deoxy-2'-fluoroadenosine-3'-phosphate
  modified_base 12: mod_base = OTHER; note = 2'-O-methyladenosine-3'-phosphate
  modified_base 13: mod_base = OTHER; note = 2'-O-methyladenosine-3'-phosphate
  modified_base 14: mod_base = OTHER; note = 2'-O-methyladenosine-3'-phosphate
  modified_base 15: mod_base = OTHER; note = 2'-O-methylcytidine-3'-phosphate
  modified_base 16: mod_base = OTHER; note = 2'-O-methyladenosine-3'-phosphate
  modified_base 17: mod_base = OTHER; note = 2'-O-methyladenosine-3'-phosphate
  modified_base 18: mod_base = OTHER; note = 2'-O-methylguanosine-3'-phosphate
  modified_base 19: mod_base = OTHER; note = 2'-O-methylguanosine-3'-phosphate
  modified_base 20: mod_base = OTHER; note = 2'-O-methyladenosine-3'-phosphate
  modified_base 21: mod_base = OTHER; note = 2'-O-methyluridine-3'-phosphate ((2S,4R)-1-[29-[[2-(acetylamino)-2-deoxy-beta-D-galactopyra nosyl]oxy]-14,14-bis[[3-[[3-[[5-[[2-(acetylamino)-2-deoxy-b eta-D-galactopyranosyl]oxy]-1-oxopentyl]amino]propyl]amino] -3-oxopropoxy]methyl]-1,12,19,25-tetraoxo-16-oxa-13,20,24-t riazanonacos-1-yl]-4-hydroxy-2-pyrrolidinyl)methyl ester
taaccagaagaaaacaaggat

SEQ ID NO: 1316 - RNA, 23 nt, synthetic construct
  source 1..23: mol_type = other RNA
  modified_base 1: mod_base = OTHER; note = 2'-O-methyladenosine-3'-phosphorothioate
  modified_base 2: mod_base = OTHER; note = 2'-deoxy-2'-fluorouridine-3'-phosphorothioate
  modified_base 3: mod_base = OTHER; note = 2'-O-methyluridine-3'-phosphate
  modified_base 4: mod_base = OTHER; note = 2'-O-methyluridine-3'-phosphate
  modified_base 5: mod_base = OTHER; note = 2'-O-methyladenosine-3'-phosphate
  modified_base 6: mod_base = OTHER; note = 2'-deoxy-2'-fluorouridine-3'-phosphate
  modified_base 7: mod_base = OTHER; note = 2'-O-methylcytidine-3'-phosphate
  modified_base 8: mod_base = OTHER; note = 2'-deoxy-2'-fluoroadenosine-3'-phosphate
  modified_base 9: mod_base = OTHER; note = 2'-deoxy-2'-fluoroguanosine-3'-phosphate
  modified_base 10: mod_base = OTHER; note = 2'-O-methylguanosine-3'-phosphate
  modified_base 11: mod_base = OTHER; note = 2'-O-methyluridine-3'-phosphate
  modified_base 12: mod_base = OTHER; note = 2'-O-methylcytidine-3'-phosphate
  modified_base 13: mod_base = OTHER; note = 2'-O-methyluridine-3'-phosphate
  modified_base 14: mod_base = OTHER; note = 2'-deoxy-2'-fluorouridine-3'-phosphate
  modified_base 15: mod_base = OTHER; note = 2'-O-methyluridine-3'-phosphate
  modified_base 16: mod_base = OTHER; note = 2'-deoxy-2'-fluorouridine-3'-phosphate
  modified_base 17: mod_base = OTHER; note = 2'-O-methylcytidine-3'-phosphate
  modified_base 18: mod_base = OTHER; note = 2'-O-methyluridine-3'-phosphate
  modified_base 19: mod_base = OTHER; note = 2'-O-methyluridine-3'-phosphate
  modified_base 20: mod_base = OTHER; note = 2'-O-methylguanosine-3'-phosphate
  modified_base 21: mod_base = OTHER; note = 2'-O-methyluridine-3'-phosphorothioate
  modified_base 22: mod_base = OTHER; note = 2'-O-methyluridine-3'-phosphorothioate
  modified_base 23: mod_base = OTHER; note = 2'-O-methylcytidine
atttatcaggtcttttcttgttc

SEQ ID NO: 1317 - RNA, 23 nt, synthetic construct
  source 1..23: mol_type = other RNA
  modified_base 1: mod_base = OTHER; note = 2'-O-methyladenosine-3'-phosphorothioate
  modified_base 2: mod_base = OTHER; note = 2'-deoxy-2'-fluoroadenosine-3'-phosphorothioate
  modified_base 3: mod_base = OTHER; note = 2'-O-methyluridine-3'-phosphate
  modified_base 4: mod_base = OTHER; note = 2'-O-methylcytidine-3'-phosphate
  modified_base 5: mod_base = OTHER; note = 2'-O-methyluridine-3'-phosphate
  modified_base 6: mod_base = OTHER; note = 2'-deoxy-2'-fluorouridine-3'-phosphate
  modified_base 7: mod_base = OTHER; note = 2'-O-methyluridine-3'-phosphate
  modified_base 8: mod_base = OTHER; note = 2'-deoxy-2'-fluoroadenosine-3'-phosphate
  modified_base 9: mod_base = OTHER; note = 2'-deoxy-2'-fluorouridine-3'-phosphate
  modified_base 10: mod_base = OTHER; note = 2'-O-methylcytidine-3'-phosphate
  modified_base 11: mod_base = OTHER; note = 2'-O-methyladenosine-3'-phosphate
  modified_base 12: mod_base = OTHER; note = 2'-O-methylguanosine-3'-phosphate
  modified_base 13: mod_base = OTHER; note = 2'-O-methylguanosine-3'-phosphate
  modified_base 14: mod_base = OTHER; note = 2'-deoxy-2'-fluorouridine-3'-phosphate
  modified_base 15: mod_base = OTHER; note = 2'-O-methylcytidine-3'-phosphate
  modified_base 16: mod_base = OTHER; note = 2'-deoxy-2'-fluorouridine-3'-phosphate
  modified_base 17: mod_base = OTHER; note = 2'-O-methyluridine-3'-phosphate
  modified_base 18: mod_base = OTHER; note = 2'-O-methyluridine-3'-phosphate
  modified_base 19: mod_base = OTHER; note = 2'-O-methyluridine-3'-phosphate
  modified_base 20: mod_base = OTHER; note = 2'-O-methylcytidine-3'-phosphate
  modified_base 21: mod_base = OTHER; note = 2'-O-methyluridine-3'-phosphorothioate
  modified_base 22: mod_base = OTHER; note = 2'-O-methyluridine-3'-phosphorothioate
  modified_base 23: mod_base = OTHER; note = 2'-O-methylguanosine
aatctttatcaggtcttttcttg

SEQ ID NO: 1318 - RNA, 23 nt, synthetic construct
  source 1..23: mol_type = other RNA
  modified_base 1: mod_base = OTHER; note = 2'-O-methyluridine-3'-phosphorothioate
  modified_base 2: mod_base = OTHER; note = 2'-deoxy-2'-fluorouridine-3'-phosphorothioate
  modified_base 3: mod_base = OTHER; note = 2'-O-methyladenosine-3'-phosphate
  modified_base 4: mod_base = OTHER; note = 2'-O-methyladenosine-3'-phosphate
  modified_base 5: mod_base = OTHER; note = 2'-O-methyluridine-3'-phosphate
  modified_base 6: mod_base = OTHER; note = 2'-deoxy-2'-fluorocytidine-3'-phosphate
  modified_base 7: mod_base = OTHER; note = 2'-O-methyluridine-3'-phosphate
  modified_base 8: mod_base = OTHER; note = 2'-deoxy-2'-fluorouridine-3'-phosphate
  modified_base 9: mod_base = OTHER; note = 2'-deoxy-2'-fluorouridine-3'-phosphate
  modified_base 10: mod_base = OTHER; note = 2'-O-methyladenosine-3'-phosphate
  modified_base 11: mod_base = OTHER; note = 2'-O-methyluridine-3'-phosphate
  modified_base 12: mod_base = OTHER; note = 2'-O-methylcytidine-3'-phosphate
  modified_base 13: mod_base = OTHER; note = 2'-O-methyladenosine-3'-phosphate
  modified_base 14: mod_base = OTHER; note = 2'-deoxy-2'-fluoroguanosine-3'-phosphate
  modified_base 15: mod_base = OTHER; note = 2'-O-methylguanosine-3'-phosphate
  modified_base 16: mod_base = OTHER; note = 2'-deoxy-2'-fluorouridine-3'-phosphate
  modified_base 17: mod_base = OTHER; note = 2'-O-methylcytidine-3'-phosphate
  modified_base 18: mod_base = OTHER; note = 2'-O-methyluridine-3'-phosphate
  modified_base 19: mod_base = OTHER; note = 2'-O-methyluridine-3'-phosphate
  modified_base 20: mod_base = OTHER; note = 2'-O-methyluridine-3'-phosphate
  modified_base 21: mod_base = OTHER; note = 2'-O-methyluridine-3'-phosphorothioate
  modified_base 22: mod_base = OTHER; note = 2'-O-methylcytidine-3'-phosphorothioate
  modified_base 23: mod_base = OTHER; note = 2'-O-methyluridine
ttaatctttatcaggtcttttct

SEQ ID NO: 1319 - RNA, 23 nt, synthetic construct
  source 1..23: mol_type = other RNA
  modified_base 1: mod_base = OTHER; note = 2'-O-methyladenosine-3'-phosphorothioate
  modified_base 2: mod_base = OTHER; note = 2'-deoxy-2'-fluorouridine-3'-phosphorothioate
  modified_base 3: mod_base = OTHER; note = 2'-O-methyluridine-3'-phosphate
  modified_base 4: mod_base = OTHER; note = 2'-O-methyladenosine-3'-phosphate
  modified_base 5: mod_base = OTHER; note = 2'-O-methyladenosine-3'-phosphate
  modified_base 6: mod_base = OTHER; note = 2'-deoxy-2'-fluorouridine-3'-phosphate
  modified_base 7: mod_base = OTHER; note = 2'-O-methylcytidine-3'-phosphate
  modified_base 8: mod_base = OTHER; note = 2'-deoxy-2'-fluorouridine-3'-phosphate
  modified_base 9: mod_base = OTHER; note = 2'-deoxy-2'-fluorouridine-3'-phosphate
  modified_base 10: mod_base = OTHER; note = 2'-O-methyluridine-3'-phosphate
  modified_base 11: mod_base = OTHER; note = 2'-O-methyladenosine-3'-phosphate
  modified_base 12: mod_base = OTHER; note = 2'-O-methyluridine-3'-phosphate
  modified_base 13: mod_base = OTHER; note = 2'-O-methylcytidine-3'-phosphate
  modified_base 14: mod_base = OTHER; note = 2'-deoxy-2'-fluoroadenosine-3'-phosphate
  modified_base 15: mod_base = OTHER; note = 2'-O-methylguanosine-3'-phosphate
  modified_base 16: mod_base = OTHER; note = 2'-deoxy-2'-fluoroguanosine-3'-phosphate
  modified_base 17: mod_base = OTHER; note = 2'-O-methyluridine-3'-phosphate
  modified_base 18: mod_base = OTHER; note = 2'-O-methylcytidine-3'-phosphate
  modified_base 19: mod_base = OTHER; note = 2'-O-methyluridine-3'-phosphate
  modified_base 20: mod_base = OTHER; note = 2'-O-methyluridine-3'-phosphate
  modified_base 21: mod_base = OTHER; note = 2'-O-methyluridine-3'-phosphorothioate
  modified_base 22: mod_base = OTHER; note = 2'-O-methyluridine-3'-phosphorothioate
  modified_base 23: mod_base = OTHER; note = 2'-O-methylcytidine
attaatctttatcaggtcttttc

SEQ ID NO: 1320 - RNA, 23 nt, synthetic construct
  source 1..23: mol_type = other RNA
  modified_base 1: mod_base = OTHER; note = 2'-O-methyladenosine-3'-phosphorothioate
  modified_base 2: mod_base = OTHER; note = 2'-deoxy-2'-fluorouridine-3'-phosphorothioate
  modified_base 3: mod_base = OTHER; note = 2'-O-methyluridine-3'-phosphate
  modified_base 4: mod_base = OTHER; note = 2'-O-methylcytidine-3'-phosphate
  modified_base 5: mod_base = OTHER; note = 2'-O-methyluridine-3'-phosphate
  modified_base 6: mod_base = OTHER; note = 2'-deoxy-2'-fluoroguanosine-3'-phosphate
  modified_base 7: mod_base = OTHER; note = 2'-O-methylguanosine-3'-phosphate
  modified_base 8: mod_base = OTHER; note = 2'-deoxy-2'-fluorouridine-3'-phosphate
  modified_base 9: mod_base = OTHER; note = 2'-deoxy-2'-fluorouridine-3'-phosphate
  modified_base 10: mod_base = OTHER; note = 2'-O-methyladenosine-3'-phosphate
  modified_base 11: mod_base = OTHER; note = 2'-O-methyladenosine-3'-phosphate
  modified_base 12: mod_base = OTHER; note = 2'-O-methyluridine-3'-phosphate
  modified_base 13: mod_base = OTHER; note = 2'-O-methylcytidine-3'-phosphate
  modified_base 14: mod_base = OTHER; note = 2'-deoxy-2'-fluorouridine-3'-phosphate
  modified_base 15: mod_base = OTHER; note = 2'-O-methyluridine-3'-phosphate
  modified_base 16: mod_base = OTHER; note = 2'-deoxy-2'-fluorouridine-3'-phosphate
  modified_base 17: mod_base = OTHER; note = 2'-O-methyladenosine-3'-phosphate
  modified_base 18: mod_base = OTHER; note = 2'-O-methyluridine-3'-phosphate
  modified_base 19: mod_base = OTHER; note = 2'-O-methylcytidine-3'-phosphate
  modified_base 20: mod_base = OTHER; note = 2'-O-methyladenosine-3'-phosphate
  modified_base 21: mod_base = OTHER; note = 2'-O-methylguanosine-3'-phosphorothioate
  modified_base 22: mod_base = OTHER; note = 2'-O-methylguanosine-3'-phosphorothioate
  modified_base 23: mod_base = OTHER; note = 2'-O-methyluridine
attctggttaatctttatcaggt

SEQ ID NO: 1321 - RNA, 23 nt, synthetic construct
  source 1..23: mol_type = other RNA
  modified_base 1: mod_base = OTHER; note = 2'-O-methyluridine-3'-phosphorothioate
  modified_base 2: mod_base = OTHER; note = 2'-deoxy-2'-fluorouridine-3'-phosphorothioate
  modified_base 3: mod_base = OTHER; note = 2'-O-methylcytidine-3'-phosphate
  modified_base 4: mod_base = OTHER; note = 2'-O-methyluridine-3'-phosphate
  modified_base 5: mod_base = OTHER; note = 2'-O-methyluridine-3'-phosphate
  modified_base 6: mod_base = OTHER; note = 2'-deoxy-2'-fluorocytidine-3'-phosphate
  modified_base 7: mod_base = OTHER; note = 2'-O-methyluridine-3'-phosphate
  modified_base 8: mod_base = OTHER; note = 2'-deoxy-2'-fluoroguanosine-3'-phosphate
  modified_base 9: mod_base = OTHER; note = 2'-deoxy-2'-fluoroguanosine-3'-phosphate
  modified_base 10: mod_base = OTHER; note = 2'-O-methyluridine-3'-phosphate
  modified_base 11: mod_base = OTHER; note = 2'-O-methyluridine-3'-phosphate
  modified_base 12: mod_base = OTHER; note = 2'-O-methyladenosine-3'-phosphate
  modified_base 13: mod_base = OTHER; note = 2'-O-methyladenosine-3'-phosphate
  modified_base 14: mod_base = OTHER; note = 2'-deoxy-2'-fluorouridine-3'-phosphate
  modified_base 15: mod_base = OTHER; note = 2'-O-methylcytidine-3'-phosphate
  modified_base 16: mod_base = OTHER; note = 2'-deoxy-2'-fluorouridine-3'-phosphate
  modified_base 17: mod_base = OTHER; note = 2'-O-methyluridine-3'-phosphate
  modified_base 18: mod_base = OTHER; note = 2'-O-methyluridine-3'-phosphate
  modified_base 19: mod_base = OTHER; note = 2'-O-methyladenosine-3'-phosphate
  modified_base 20: mod_base = OTHER; note = 2'-O-methyluridine-3'-phosphate
  modified_base 21: mod_base = OTHER; note = 2'-O-methylcytidine-3'-phosphorothioate
  modified_base 22: mod_base = OTHER; note = 2'-O-methyladenosine-3'-phosphorothioate
  modified_base 23: mod_base = OTHER; note = 2'-O-methylguanosine
ttcttctggttaatctttatcag

SEQ ID NO: 1322 - RNA, 23 nt, synthetic construct
  source 1..23: mol_type = other RNA
  modified_base 1: mod_base = OTHER; note = 2'-O-methyluridine-3'-phosphorothioate
  modified_base 2: mod_base = OTHER; note = 2'-deoxy-2'-fluorouridine-3'-phosphorothioate
  modified_base 3: mod_base = OTHER; note = 2'-O-methyluridine-3'-phosphate
  modified_base 4: mod_base = OTHER; note = 2'-O-methylcytidine-3'-phosphate
  modified_base 5: mod_base = OTHER; note = 2'-O-methyluridine-3'-phosphate
  modified_base 6: mod_base = OTHER; note = 2'-deoxy-2'-fluorouridine-3'-phosphate
  modified_base 7: mod_base = OTHER; note = 2'-O-methylcytidine-3'-phosphate
  modified_base 8: mod_base = OTHER; note = 2'-deoxy-2'-fluorouridine-3'-phosphate
  modified_base 9: mod_base = OTHER; note = 2'-deoxy-2'-fluoroguanosine-3'-phosphate
  modified_base 10: mod_base = OTHER; note = 2'-O-methylguanosine-3'-phosphate
  modified_base 11: mod_base = OTHER; note = 2'-O-methyluridine-3'-phosphate
  modified_base 12: mod_base = OTHER; note = 2'-O-methyluridine-3'-phosphate
  modified_base 13: mod_base = OTHER; note = 2'-O-methyladenosine-3'-phosphate
  modified_base 14: mod_base = OTHER; note = 2'-deoxy-2'-fluoroadenosine-3'-phosphate
  modified_base 15: mod_base = OTHER; note = 2'-O-methyluridine-3'-phosphate
  modified_base 16: mod_base = OTHER; note = 2'-deoxy-2'-fluorocytidine-3'-phosphate
  modified_base 17: mod_base = OTHER; note = 2'-O-methyluridine-3'-phosphate
  modified_base 18: mod_base = OTHER; note = 2'-O-methyluridine-3'-phosphate
  modified_base 19: mod_base = OTHER; note = 2'-O-methyluridine-3'-phosphate
  modified_base 20: mod_base = OTHER; note = 2'-O-methyladenosine-3'-phosphate
  modified_base 21: mod_base = OTHER; note = 2'-O-methyluridine-3'-phosphorothioate
  modified_base 22: mod_base = OTHER; note = 2'-O-methylcytidine-3'-phosphorothioate
  modified_base 23: mod_base = OTHER; note = 2'-O-methyladenosine
tttcttctggttaatctttatca

SEQ ID NO: 1323 - RNA, 23 nt, synthetic construct
  source 1..23: mol_type = other RNA
  modified_base 1: mod_base = OTHER; note = 2'-O-methyladenosine-3'-phosphorothioate
  modified_base 2: mod_base = OTHER; note = 2'-deoxy-2'-fluorouridine-3'-phosphorothioate
  modified_base 3: mod_base = OTHER; note = 2'-O-methyluridine-3'-phosphate
  modified_base 4: mod_base = OTHER; note = 2'-O-methyluridine-3'-phosphate
  modified_base 5: mod_base = OTHER; note = 2'-O-methyluridine-3'-phosphate
  modified_base 6: mod_base = OTHER; note = 2'-deoxy-2'-fluorocytidine-3'-phosphate
  modified_base 7: mod_base = OTHER; note = 2'-O-methyluridine-3'-phosphate
  modified_base 8: mod_base = OTHER; note = 2'-deoxy-2'-fluorouridine-3'-phosphate
  modified_base 9: mod_base = OTHER; note = 2'-deoxy-2'-fluorocytidine-3'-phosphate
  modified_base 10: mod_base = OTHER; note = 2'-O-methyluridine-3'-phosphate
  modified_base 11: mod_base = OTHER; note = 2'-O-methylguanosine-3'-phosphate
  modified_base 12: mod_base = OTHER; note = 2'-O-methylguanosine-3'-phosphate
  modified_base 13: mod_base = OTHER; note = 2'-O-methyluridine-3'-phosphate
  modified_base 14: mod_base = OTHER; note = 2'-deoxy-2'-fluorouridine-3'-phosphate
  modified_base 15: mod_base = OTHER; note = 2'-O-methyladenosine-3'-phosphate
  modified_base 16: mod_base = OTHER; note = 2'-deoxy-2'-fluoroadenosine-3'-phosphate
  modified_base 17: mod_base = OTHER; note = 2'-O-methyluridine-3'-phosphate
  modified_base 18: mod_base = OTHER; note = 2'-O-methylcytidine-3'-phosphate
  modified_base 19: mod_base = OTHER; note = 2'-O-methyluridine-3'-phosphate
  modified_base 20: mod_base = OTHER; note = 2'-O-methyluridine-3'-phosphate
  modified_base 21: mod_base = OTHER; note = 2'-O-methyluridine-3'-phosphorothioate
  modified_base 22: mod_base = OTHER; note = 2'-O-methyladenosine-3'-phosphorothioate
  modified_base 23: mod_base = OTHER; note = 2'-O-methyluridine
attttcttctggttaatctttat

SEQ ID NO: 1324 - RNA, 23 nt, synthetic construct
  source 1..23: mol_type = other RNA
  modified_base 1: mod_base = OTHER; note = 2'-O-methyladenosine-3'-phosphorothioate
  modified_base 2: mod_base = OTHER; note = 2'-deoxy-2'-fluorouridine-3'-phosphorothioate
  modified_base 3: mod_base = OTHER; note = 2'-O-methylcytidine-3'-phosphate
  modified_base 4: mod_base = OTHER; note = 2'-O-methylcytidine-3'-phosphate
  modified_base 5: mod_base = OTHER; note = 2'-O-methyluridine-3'-phosphate
  modified_base 6: mod_base = OTHER; note = 2'-deoxy-2'-fluorouridine-3'-phosphate
  modified_base 7: mod_base = OTHER; note = 2'-O-methylguanosine-3'-phosphate
  modified_base 8: mod_base = OTHER; note = 2'-deoxy-2'-fluorouridine-3'-phosphate
  modified_base 9: mod_base = OTHER; note = 2'-deoxy-2'-fluorouridine-3'-phosphate
  modified_base 10: mod_base = OTHER; note = 2'-O-methyluridine-3'-phosphate
  modified_base 11: mod_base = OTHER; note = 2'-O-methyluridine-3'-phosphate
  modified_base 12: mod_base = OTHER; note = 2'-O-methylcytidine-3'-phosphate
  modified_base 13: mod_base = OTHER; note = 2'-O-methyluridine-3'-phosphate
  modified_base 14: mod_base = OTHER; note = 2'-deoxy-2'-fluorouridine-3'-phosphate
  modified_base 15: mod_base = OTHER; note = 2'-O-methylcytidine-3'-phosphate
  modified_base 16: mod_base = OTHER; note = 2'-deoxy-2'-fluorouridine-3'-phosphate
  modified_base 17: mod_base = OTHER; note = 2'-O-methylguanosine-3'-phosphate
  modified_base 18: mod_base = OTHER; note = 2'-O-methylguanosine-3'-phosphate
  modified_base 19: mod_base = OTHER; note = 2'-O-methyluridine-3'-phosphate
  modified_base 20: mod_base = OTHER; note = 2'-O-methyluridine-3'-phosphate
  modified_base 21: mod_base = OTHER; note = 2'-O-methyladenosine-3'-phosphorothioate
  modified_base 22: mod_base = OTHER; note = 2'-O-methyladenosine-3'-phosphorothioate
  modified_base 23: mod_base = OTHER; note = 2'-O-methyluridine
atccttgttttcttctggttaat

SEQ ID NO: 1325 - RNA, 21 nt, synthetic construct
  source 1..21: mol_type = other RNA
catatggactatcaattataa

SEQ ID NO: 1326 - RNA, 21 nt, synthetic construct
  source 1..21: mol_type = other RNA
tgttgccaagacagagattga

SEQ ID NO: 1327 - RNA, 21 nt, synthetic construct
  source 1..21: mol_type = other RNA
caagacagagattgctttaaa

SEQ ID NO: 1328 - RNA, 21 nt, synthetic construct
  source 1..21: mol_type = other RNA
taaatggagaaatccttcgaa

SEQ ID NO: 1329 - RNA, 21 nt, synthetic construct
  source 1..21: mol_type = other RNA
tgtgtgttgatagattaacaa

SEQ ID NO: 1330 - RNA, 21 nt, synthetic construct
  source 1..21: mol_type = other RNA
cagaacttagtttctacctca

SEQ ID NO: 1331 - RNA, 21 nt, synthetic construct
  source 1..21: mol_type = other RNA
acagaacttagtttctaccta

SEQ ID NO: 1332 - RNA, 21 nt, synthetic construct
  source 1..21: mol_type = other RNA
tggactatcaattatacttca

SEQ ID NO: 1333 - RNA, 21 nt, synthetic construct
  source 1..21: mol_type = other RNA
agtgatgtcgactctttgcca

SEQ ID NO: 1334 - RNA, 21 nt, synthetic construct
  source 1..21: mol_type = other RNA
aagacagagattgctttaaga

SEQ ID NO: 1335 - RNA, 21 nt, synthetic construct
  source 1..21: mol_type = other RNA
aatattcttggtcctagagta

SEQ ID NO: 1336 - RNA, 21 nt, synthetic construct
  source 1..21: mol_type = other RNA
tgatacagtactcaatgatga

SEQ ID NO: 1337 - RNA, 21 nt, synthetic construct
  source 1..21: mol_type = other RNA
tagctgatacagtactcaata

SEQ ID NO: 1338 - RNA, 21 nt, synthetic construct
  source 1..21: mol_type = other RNA
ctgtcatgaaggctttcttca

SEQ ID NO: 1339 - RNA, 21 nt, synthetic construct
  source 1..21: mol_type = other RNA
acatatttataatcagcgtaa

SEQ ID NO: 1340 - RNA, 21 nt, synthetic construct
  source 1..21: mol_type = other RNA
gtcttacacagagacactcta

SEQ ID NO: 1341 - RNA, 23 nt, synthetic construct
  source 1..23: mol_type = other RNA
  modified_base 7: mod_base = OTHER; note = 5'-methyluridine-3'-phosphate
ttataattgatagtccatatgtg

SEQ ID NO: 1342 - RNA, 23 nt, synthetic construct
  source 1..23: mol_type = other RNA
  modified_base 7: mod_base = OTHER; note = 5'-methyluridine-3'-phosphate
tcaatctctgtcttggcaacagc

SEQ ID NO: 1343 - RNA, 23 nt, synthetic construct
  source 1..23: mol_type = other RNA
tttaaagcaatctctgtcttggc

SEQ ID NO: 1344 - RNA, 23 nt, synthetic construct
  source 1..23: mol_type = other RNA
ttcgaaggatttctccatttaga

SEQ ID NO: 1345 - RNA, 23 nt, synthetic construct
  source 1..23: mol_type = other RNA
ttgttaatctatcaacacacact

SEQ ID NO: 1346 - RNA, 23 nt, synthetic construct
  source 1..23: mol_type = other RNA
tgaggtagaaactaagttctgtc

SEQ ID NO: 1347 - RNA, 23 nt, synthetic construct
  source 1..23: mol_type = other RNA
taggtagaaactaagttctgtct

SEQ ID NO: 1348 - RNA, 23 nt, synthetic construct
  source 1..23: mol_type = other RNA
tgaagtataattgatagtccata

SEQ ID NO: 1349 - RNA, 23 nt, synthetic construct
  source 1..23: mol_type = other RNA
tggcaaagagtcgacatcactgc

SEQ ID NO: 1350 - RNA, 23 nt, synthetic construct
  source 1..23: mol_type = other RNA
tcttaaagcaatctctgtcttgg

SEQ ID NO: 1351 - RNA, 23 nt, synthetic construct
  source 1..23: mol_type = other RNA
tactctaggaccaagaatattgt

SEQ ID NO: 1352 - RNA, 23 nt, synthetic construct
  source 1..23: mol_type = other RNA
  modified_base 7: mod_base = OTHER; note = 5'-methyluridine-3'-phosphate
tcatcattgagtactgtatcagc

SEQ ID NO: 1353 - RNA, 23 nt, synthetic construct
  source 1..23: mol_type = other RNA
tattgagtactgtatcagctata

SEQ ID NO: 1354 - RNA, 23 nt, synthetic construct
  source 1..23: mol_type = other RNA
tgaagaaagccttcatgacagct

SEQ ID NO: 1355 - RNA, 23 nt, synthetic construct
  source 1..23: mol_type = other RNA
  modified_base 7: mod_base = OTHER; note = 5'-methyluridine-3'-phosphate
ttacgctgattataaatatgttc

SEQ ID NO: 1356 - RNA, 23 nt, synthetic construct
  source 1..23: mol_type = other RNA
tagagtgtctctgtgtaagacat

SEQ ID NO: 1357 - RNA, 21 nt, synthetic construct
  source 1..21: mol_type = other RNA
  modified_base 1: mod_base = OTHER; note = 2'-O-methylcytidine-3'-phosphorothioate
  modified_base 2: mod_base = OTHER; note = 2'-O-methyladenosine-3'-phosphorothioate
  modified_base 3: mod_base = OTHER; note = 2'-O-methyluridine-3'-phosphate
  modified_base 4: mod_base = OTHER; note = 2'-O-methyladenosine-3'-phosphate
  modified_base 5: mod_base = OTHER; note = 2'-O-methyluridine-3'-phosphate
  modified_base 6: mod_base = OTHER; note = 2'-O-hexadecyl-guanosine-3'-phosphate
  modified_base 7: mod_base = OTHER; note = 2'-deoxy-2'-fluoroguanosine-3'-phosphate
  modified_base 8: mod_base = OTHER; note = 2'-O-methyladenosine-3'-phosphate
  modified_base 9: mod_base = OTHER; note = 2'-deoxy-2'-fluorocytidine-3'-phosphate
  modified_base 10: mod_base = OTHER; note = 2'-deoxy-2'-fluorouridine-3'-phosphate
  modified_base 11: mod_base = OTHER; note = 2'-deoxy-2'-fluoroadenosine-3'-phosphate
  modified_base 12: mod_base = OTHER; note = 2'-O-methyluridine-3'-phosphate
  modified_base 13: mod_base = OTHER; note = 2'-O-methylcytidine-3'-phosphate
  modified_base 14: mod_base = OTHER; note = 2'-O-methyladenosine-3'-phosphate
  modified_base 15: mod_base = OTHER; note = 2'-O-methyladenosine-3'-phosphate
  modified_base 16: mod_base = OTHER; note = 2'-O-methyluridine-3'-phosphate
  modified_base 17: mod_base = OTHER; note = 2'-O-methyluridine-3'-phosphate
  modified_base 18: mod_base = OTHER; note = 2'-O-methyladenosine-3'-phosphate
  modified_base 19: mod_base = OTHER; note = 2'-O-methyluridine-3'-phosphorothioate
  modified_base 20: mod_base = OTHER; note = 2'-O-methyladenosine-3'-phosphorothioate
  modified_base 21: mod_base = OTHER; note = 2'-O-methyladenosine
catatggactatcaattataa

SEQ ID NO: 1358 - RNA, 21 nt, synthetic construct
  source 1..21: mol_type = other RNA
  modified_base 1: mod_base = OTHER; note = 2'-O-methyluridine-3'-phosphorothioate
  modified_base 2: mod_base = OTHER; note = 2'-O-methylguanosine-3'-phosphorothioate
  modified_base 3: mod_base = OTHER; note = 2'-O-methyluridine-3'-phosphate
  modified_base 4: mod_base = OTHER; note = 2'-O-methyluridine-3'-phosphate
  modified_base 5: mod_base = OTHER; note = 2'-O-methylguanosine-3'-phosphate
  modified_base 6: mod_base = OTHER; note = 2'-O-hexadecyl-cytidine-3'-phosphate
  modified_base 7: mod_base = OTHER; note = 2'-deoxy-2'-fluorocytidine-3'-phosphate
  modified_base 8: mod_base = OTHER; note = 2'-O-methyladenosine-3'-phosphate
  modified_base 9: mod_base = OTHER; note = 2'-deoxy-2'-fluoroadenosine-3'-phosphate
  modified_base 10: mod_base = OTHER; note = 2'-deoxy-2'-fluoroguanosine-3'-phosphate
  modified_base 11: mod_base = OTHER; note = 2'-deoxy-2'-fluoroadenosine-3'-phosphate
  modified_base 12: mod_base = OTHER; note = 2'-O-methylcytidine-3'-phosphate
  modified_base 13: mod_base = OTHER; note = 2'-O-methyladenosine-3'-phosphate
  modified_base 14: mod_base = OTHER; note = 2'-O-methylguanosine-3'-phosphate
  modified_base 15: mod_base = OTHER; note = 2'-O-methyladenosine-3'-phosphate
  modified_base 16: mod_base = OTHER; note = 2'-O-methylguanosine-3'-phosphate
  modified_base 17: mod_base = OTHER; note = 2'-O-methyladenosine-3'-phosphate
  modified_base 18: mod_base = OTHER; note = 2'-O-methyluridine-3'-phosphate
  modified_base 19: mod_base = OTHER; note = 2'-O-methyluridine-3'-phosphorothioate
  modified_base 20: mod_base = OTHER; note = 2'-O-methylguanosine-3'-phosphorothioate
  modified_base 21: mod_base = OTHER; note = 2'-O-methyladenosine
tgttgccaagacagagattga

SEQ ID NO: 1359 - RNA, 21 nt, synthetic construct
  source 1..21: mol_type = other RNA
  modified_base 1: mod_base = OTHER; note = 2'-O-methylcytidine-3'-phosphorothioate
  modified_base 2: mod_base = OTHER; note = 2'-O-methyladenosine-3'-phosphorothioate
  modified_base 3: mod_base = OTHER; note = 2'-O-methyladenosine-3'-phosphate
  modified_base 4: mod_base = OTHER; note = 2'-O-methylguanosine-3'-phosphate
  modified_base 5: mod_base = OTHER; note = 2'-O-methyladenosine-3'-phosphate
  modified_base 6: mod_base = OTHER; note = 2'-O-hexadecyl-cytidine-3'-phosphate
  modified_base 7: mod_base = OTHER; note = 2'-deoxy-2'-fluoroadenosine-3'-phosphate
  modified_base 8: mod_base = OTHER; note = 2'-O-methylguanosine-3'-phosphate
  modified_base 9: mod_base = OTHER; note = 2'-deoxy-2'-fluoroadenosine-3'-phosphate
  modified_base 10: mod_base = OTHER; note = 2'-deoxy-2'-fluoroguanosine-3'-phosphate
  modified_base 11: mod_base = OTHER; note = 2'-deoxy-2'-fluoroadenosine-3'-phosphate
  modified_base 12: mod_base = OTHER; note = 2'-O-methyluridine-3'-phosphate
  modified_base 13: mod_base = OTHER; note = 2'-O-methyluridine-3'-phosphate
  modified_base 14: mod_base = OTHER; note = 2'-O-methylguanosine-3'-phosphate
  modified_base 15: mod_base = OTHER; note = 2'-O-methylcytidine-3'-phosphate
  modified_base 16: mod_base = OTHER; note = 2'-O-methyluridine-3'-phosphate
  modified_base 17: mod_base = OTHER; note = 2'-O-methyluridine-3'-phosphate
  modified_base 18: mod_base = OTHER; note = 2'-O-methyluridine-3'-phosphate
  modified_base 19: mod_base = OTHER; note = 2'-O-methyladenosine-3'-phosphorothioate
  modified_base 20: mod_base = OTHER; note = 2'-O-methyladenosine-3'-phosphorothioate
  modified_base 21: mod_base = OTHER; note = 2'-O-methyladenosine
caagacagagattgctttaaa

SEQ ID NO: 1360 - RNA, 21 nt, synthetic construct
  source 1..21: mol_type = other RNA
  modified_base 1: mod_base = OTHER; note = 2'-O-methyluridine-3'-phosphorothioate
  modified_base 2: mod_base = OTHER; note = 2'-O-methyladenosine-3'-phosphorothioate
  modified_base 3: mod_base = OTHER; note = 2'-O-methyladenosine-3'-phosphate
  modified_base 4: mod_base = OTHER; note = 2'-O-methyladenosine-3'-phosphate
  modified_base 5: mod_base = OTHER; note = 2'-O-methyluridine-3'-phosphate
  modified_base 6: mod_base = OTHER; note = 2'-O-hexadecyl-guanosine-3'-phosphate
  modified_base 7: mod_base = OTHER; note = 2'-deoxy-2'-fluoroguanosine-3'-phosphate
  modified_base 8: mod_base = OTHER; note = 2'-O-methyladenosine-3'-phosphate
  modified_base 9: mod_base = OTHER; note = 2'-deoxy-2'-fluoroguanosine-3'-phosphate
  modified_base 10: mod_base = OTHER; note = 2'-deoxy-2'-fluoroadenosine-3'-phosphate
  modified_base 11: mod_base = OTHER; note = 2'-deoxy-2'-fluoroadenosine-3'-phosphate
  modified_base 12: mod_base = OTHER; note = 2'-O-methyladenosine-3'-phosphate
  modified_base 13: mod_base = OTHER; note = 2'-O-methyluridine-3'-phosphate
  modified_base 14: mod_base = OTHER; note = 2'-O-methylcytidine-3'-phosphate
  modified_base 15: mod_base = OTHER; note = 2'-O-methylcytidine-3'-phosphate
  modified_base 16: mod_base = OTHER; note = 2'-O-methyluridine-3'-phosphate
  modified_base 17: mod_base = OTHER; note = 2'-O-methyluridine-3'-phosphate
  modified_base 18: mod_base = OTHER; note = 2'-O-methylcytidine-3'-phosphate
  modified_base 19: mod_base = OTHER; note = 2'-O-methylguanosine-3'-phosphorothioate
  modified_base 20: mod_base = OTHER; note = 2'-O-methyladenosine-3'-phosphorothioate
  modified_base 21: mod_base = OTHER; note = 2'-O-methyladenosine
taaatggagaaatccttcgaa

SEQ ID NO: 1361 - RNA, 21 nt, synthetic construct
  source 1..21: mol_type = other RNA
  modified_base 1: mod_base = OTHER; note = 2'-O-methyluridine-3'-phosphorothioate
  modified_base 2: mod_base = OTHER; note = 2'-O-methylguanosine-3'-phosphorothioate
  modified_base 3: mod_base = OTHER; note = 2'-O-methyluridine-3'-phosphate
  modified_base 4: mod_base = OTHER; note = 2'-O-methylguanosine-3'-phosphate
  modified_base 5: mod_base = OTHER; note = 2'-O-methyluridine-3'-phosphate
  modified_base 6: mod_base = OTHER; note = 2'-O-hexadecyl-guanosine-3'-phosphate
  modified_base 7: mod_base = OTHER; note = 2'-deoxy-2'-fluorouridine-3'-phosphate
  modified_base 8: mod_base = OTHER; note = 2'-O-methyluridine-3'-phosphate
  modified_base 9: mod_base = OTHER; note = 2'-deoxy-2'-fluoroguanosine-3'-phosphate
  modified_base 10: mod_base = OTHER; note = 2'-deoxy-2'-fluoroadenosine-3'-phosphate
  modified_base 11: mod_base = OTHER; note = 2'-deoxy-2'-fluorouridine-3'-phosphate
  modified_base 12: mod_base = OTHER; note = 2'-O-methyladenosine-3'-phosphate
  modified_base 13: mod_base = OTHER; note = 2'-O-methylguanosine-3'-phosphate
  modified_base 14: mod_base = OTHER; note = 2'-O-methyladenosine-3'-phosphate
  modified_base 15: mod_base = OTHER; note = 2'-O-methyluridine-3'-phosphate
  modified_base 16: mod_base = OTHER; note = 2'-O-methyluridine-3'-phosphate
  modified_base 17: mod_base = OTHER; note = 2'-O-methyladenosine-3'-phosphate
  modified_base 18: mod_base = OTHER; note = 2'-O-methyladenosine-3'-phosphate
  modified_base 19: mod_base = OTHER; note = 2'-O-methylcytidine-3'-phosphorothioate
  modified_base 20: mod_base = OTHER; note = 2'-O-methyladenosine-3'-phosphorothioate
  modified_base 21: mod_base = OTHER; note = 2'-O-methyladenosine
tgtgtgttgatagattaacaa

SEQ ID NO: 1362 - RNA, 21 nt, synthetic construct
  source 1..21: mol_type = other RNA
  modified_base 1: mod_base = OTHER; note = 2'-O-methylcytidine-3'-phosphorothioate
  modified_base 2: mod_base = OTHER; note = 2'-O-methyladenosine-3'-phosphorothioate
  modified_base 3: mod_base = OTHER; note = 2'-O-methylguanosine-3'-phosphate
  modified_base 4: mod_base = OTHER; note = 2'-O-methyladenosine-3'-phosphate
  modified_base 5: mod_base = OTHER; note = 2'-O-methyladenosine-3'-phosphate
  modified_base 6: mod_base = OTHER; note = 2'-O-hexadecyl-cytidine-3'-phosphate
  modified_base 7: mod_base = OTHER; note = 2'-deoxy-2'-fluorouridine-3'-phosphate
  modified_base 8: mod_base = OTHER; note = 2'-O-methyluridine-3'-phosphate
  modified_base 9: mod_base = OTHER; note = 2'-deoxy-2'-fluoroadenosine-3'-phosphate
  modified_base 10: mod_base = OTHER; note = 2'-deoxy-2'-fluoroguanosine-3'-phosphate
  modified_base 11: mod_base = OTHER; note = 2'-deoxy-2'-fluorouridine-3'-phosphate
  modified_base 12: mod_base = OTHER; note = 2'-O-methyluridine-3'-phosphate
  modified_base 13: mod_base = OTHER; note = 2'-O-methyluridine-3'-phosphate
  modified_base 14: mod_base = OTHER; note = 2'-O-methylcytidine-3'-phosphate
  modified_base 15: mod_base = OTHER; note = 2'-O-methyluridine-3'-phosphate
  modified_base 16: mod_base = OTHER; note = 2'-O-methyladenosine-3'-phosphate
  modified_base 17: mod_base = OTHER; note = 2'-O-methylcytidine-3'-phosphate
  modified_base 18: mod_base = OTHER; note = 2'-O-methylcytidine-3'-phosphate
  modified_base 19: mod_base = OTHER; note = 2'-O-methyluridine-3'-phosphorothioate
  modified_base 20: mod_base = OTHER; note = 2'-O-methylcytidine-3'-phosphorothioate
  modified_base 21: mod_base = OTHER; note = 2'-O-methyladenosine
cagaacttagtttctacctca

SEQ ID NO: 1363 - RNA, 21 nt, synthetic construct
  source 1..21: mol_type = other RNA
  modified_base 1: mod_base = OTHER; note = 2'-O-methyladenosine-3'-phosphorothioate
  modified_base 2: mod_base = OTHER; note = 2'-O-methylcytidine-3'-phosphorothioate
  modified_base 3: mod_base = OTHER; note = 2'-O-methyladenosine-3'-phosphate
  modified_base 4: mod_base = OTHER; note = 2'-O-methylguanosine-3'-phosphate
  modified_base 5: mod_base = OTHER; note = 2'-O-methyladenosine-3'-phosphate
  modified_base 6: mod_base = OTHER; note = 2'-O-hexadecyl-adenosine-3'-phosphate
  modified_base 7: mod_base = OTHER; note = 2'-deoxy-2'-fluorocytidine-3'-phosphate
  modified_base 8: mod_base = OTHER; note = 2'-O-methyluridine-3'-phosphate
  modified_base 9: mod_base = OTHER; note = 2'-deoxy-2'-fluorouridine-3'-phosphate
  modified_base 10: mod_base = OTHER; note = 2'-deoxy-2'-fluoroadenosine-3'-phosphate
  modified_base 11: mod_base = OTHER; note = 2'-deoxy-2'-fluoroguanosine-3'-phosphate
  modified_base 12: mod_base = OTHER; note = 2'-O-methyluridine-3'-phosphate
  modified_base 13: mod_base = OTHER; note = 2'-O-methyluridine-3'-phosphate
  modified_base 14: mod_base = OTHER; note = 2'-O-methyluridine-3'-phosphate
  modified_base 15: mod_base = OTHER; note = 2'-O-methylcytidine-3'-phosphate
  modified_base 16: mod_base = OTHER; note = 2'-O-methyluridine-3'-phosphate
  modified_base 17: mod_base = OTHER; note = 2'-O-methyladenosine-3'-phosphate
  modified_base 18: mod_base = OTHER; note = 2'-O-methylcytidine-3'-phosphate
  modified_base 19: mod_base = OTHER; note = 2'-O-methylcytidine-3'-phosphorothioate
  modified_base 20: mod_base = OTHER; note = 2'-O-methyluridine-3'-phosphorothioate
  modified_base 21: mod_base = OTHER; note = 2'-O-methyladenosine
acagaacttagtttctaccta

SEQ ID NO: 1364 - RNA, 21 nt, synthetic construct
  source 1..21: mol_type = other RNA
  modified_base 1: mod_base = OTHER; note = 2'-O-methyluridine-3'-phosphorothioate
  modified_base 2: mod_base = OTHER; note = 2'-O-methylguanosine-3'-phosphorothioate
  modified_base 3: mod_base = OTHER; note = 2'-O-methylguanosine-3'-phosphate
  modified_base 4: mod_base = OTHER; note = 2'-O-methyladenosine-3'-phosphate
  modified_base 5: mod_base = OTHER; note = 2'-O-methylcytidine-3'-phosphate
  modified_base 6: mod_base = OTHER; note = 2'-O-hexadecyl-uridine-3'-phosphate
  modified_base 7: mod_base = OTHER; note = 2'-deoxy-2'-fluoroadenosine-3'-phosphate
  modified_base 8: mod_base = OTHER; note = 2'-O-methyluridine-3'-phosphate
  modified_base 9: mod_base = OTHER; note = 2'-deoxy-2'-fluorocytidine-3'-phosphate
  modified_base 10: mod_base = OTHER; note = 2'-deoxy-2'-fluoroadenosine-3'-phosphate
  modified_base 11: mod_base = OTHER; note = 2'-deoxy-2'-fluoroadenosine-3'-phosphate
  modified_base 12: mod_base = OTHER; note = 2'-O-methyluridine-3'-phosphate
  modified_base 13: mod_base = OTHER; note = 2'-O-methyluridine-3'-phosphate
  modified_base 14: mod_base = OTHER; note = 2'-O-methyladenosine-3'-phosphate
  modified_base 15: mod_base = OTHER; note = 2'-O-methyluridine-3'-phosphate
  modified_base 16: mod_base = OTHER; note = 2'-O-methyladenosine-3'-phosphate
  modified_base 17: mod_base = OTHER; note = 2'-O-methylcytidine-3'-phosphate
  modified_base 18: mod_base = OTHER; note = 2'-O-methyluridine-3'-phosphate
  modified_base 19: mod_base = OTHER; note = 2'-O-methyluridine-3'-phosphorothioate
  modified_base 20: mod_base = OTHER; note = 2'-O-methylcytidine-3'-phosphorothioate
  modified_base 21: mod_base = OTHER; note = 2'-O-methyladenosine
tggactatcaattatacttca

SEQ ID NO: 1365 - RNA, 21 nt, synthetic construct
  source 1..21: mol_type = other RNA
  modified_base 1: mod_base = OTHER; note = 2'-O-methyladenosine-3'-phosphorothioate
  modified_base 2: mod_base = OTHER; note = 2'-O-methylguanosine-3'-phosphorothioate
  modified_base 3: mod_base = OTHER; note = 2'-O-methyluridine-3'-phosphate
  modified_base 4: mod_base = OTHER; note = 2'-O-methylguanosine-3'-phosphate
  modified_base 5: mod_base = OTHER; note = 2'-O-methyladenosine-3'-phosphate
  modified_base 6: mod_base = OTHER; note = 2'-O-hexadecyl-uridine-3'-phosphate
  modified_base 7: mod_base = OTHER; note = 2'-deoxy-2'-fluoroguanosine-3'-phosphate
  modified_base 8: mod_base = OTHER; note = 2'-O-methyluridine-3'-phosphate
  modified_base 9: mod_base = OTHER; note = 2'-deoxy-2'-fluorocytidine-3'-phosphate
  modified_base 10: mod_base = OTHER; note = 2'-deoxy-2'-fluoroguanosine-3'-phosphate
  modified_base 11: mod_base = OTHER; note = 2'-deoxy-2'-fluoroadenosine-3'-phosphate
  modified_base 12: mod_base = OTHER; note = 2'-O-methylcytidine-3'-phosphate
  modified_base 13: mod_base = OTHER; note = 2'-O-methyluridine-3'-phosphate
  modified_base 14: mod_base = OTHER; note = 2'-O-methylcytidine-3'-phosphate
  modified_base 15: mod_base = OTHER; note = 2'-O-methyluridine-3'-phosphate
  modified_base 16: mod_base = OTHER; note = 2'-O-methyluridine-3'-phosphate
  modified_base 17: mod_base = OTHER; note = 2'-O-methyluridine-3'-phosphate
  modified_base 18: mod_base = OTHER; note = 2'-O-methylguanosine-3'-phosphate
  modified_base 19: mod_base = OTHER; note = 2'-O-methylcytidine-3'-phosphorothioate
  modified_base 20: mod_base = OTHER; note = 2'-O-methylcytidine-3'-phosphorothioate
  modified_base 21: mod_base = OTHER; note = 2'-O-methyladenosine
agtgatgtcgactctttgcca

SEQ ID NO: 1366 - RNA, 21 nt, synthetic construct
  source 1..21: mol_type = other RNA
  modified_base 1: mod_base = OTHER; note = 2'-O-methyladenosine-3'-phosphorothioate
  modified_base 2: mod_base = OTHER; note = 2'-O-methyladenosine-3'-phosphorothioate
  modified_base 3: mod_base = OTHER; note = 2'-O-methylguanosine-3'-phosphate
  modified_base 4: mod_base = OTHER; note = 2'-O-methyladenosine-3'-phosphate
  modified_base 5: mod_base = OTHER; note = 2'-O-methylcytidine-3'-phosphate
  modified_base 6: mod_base = OTHER; note = 2'-O-hexadecyl-adenosine-3'-phosphate
  modified_base 7: mod_base = OTHER; note = 2'-deoxy-2'-fluoroguanosine-3'-phosphate
  modified_base 8: mod_base = OTHER; note = 2'-O-methyladenosine-3'-phosphate
  modified_base 9: mod_base = OTHER; note = 2'-deoxy-2'-fluoroguanosine-3'-phosphate
  modified_base 10: mod_base = OTHER; note = 2'-deoxy-2'-fluoroadenosine-3'-phosphate
  modified_base 11: mod_base = OTHER; note = 2'-deoxy-2'-fluorouridine-3'-phosphate
  modified_base 12: mod_base = OTHER; note = 2'-O-methyluridine-3'-phosphate
  modified_base 13: mod_base = OTHER; note = 2'-O-methylguanosine-3'-phosphate
  modified_base 14: mod_base = OTHER; note = 2'-O-methylcytidine-3'-phosphate
  modified_base 15: mod_base = OTHER; note = 2'-O-methyluridine-3'-phosphate
  modified_base 16: mod_base = OTHER; note = 2'-O-methyluridine-3'-phosphate
  modified_base 17: mod_base = OTHER; note = 2'-O-methyluridine-3'-phosphate
  modified_base 18: mod_base = OTHER; note = 2'-O-methyladenosine-3'-phosphate
  modified_base 19: mod_base = OTHER; note = 2'-O-methyladenosine-3'-phosphorothioate
  modified_base 20: mod_base = OTHER; note = 2'-O-methylguanosine-3'-phosphorothioate
  modified_base 21: mod_base = OTHER; note = 2'-O-methyladenosine
aagacagagattgctttaaga

SEQ ID NO: 1367 - RNA, 21 nt, synthetic construct
  source 1..21: mol_type = other RNA
  modified_base 1: mod_base = OTHER; note = 2'-O-methyladenosine-3'-phosphorothioate
  modified_base 2: mod_base = OTHER; note = 2'-O-methyladenosine-3'-phosphorothioate
  modified_base 3: mod_base = OTHER; note = 2'-O-methyluridine-3'-phosphate
  modified_base 4: mod_base = OTHER; note = 2'-O-methyladenosine-3'-phosphate
  modified_base 5: mod_base = OTHER; note = 2'-O-methyluridine-3'-phosphate
  modified_base 6: mod_base = OTHER; note = 2'-O-hexadecyl-uridine-3'-phosphate
  modified_base 7: mod_base = OTHER; note = 2'-deoxy-2'-fluorocytidine-3'-phosphate
  modified_base 8: mod_base = OTHER; note = 2'-O-methyluridine-3'-phosphate
  modified_base 9: mod_base = OTHER; note = 2'-deoxy-2'-fluorouridine-3'-phosphate
  modified_base 10: mod_base = OTHER; note = 2'-deoxy-2'-fluoroguanosine-3'-phosphate
  modified_base 11: mod_base = OTHER; note = 2'-deoxy-2'-fluoroguanosine-3'-phosphate
  modified_base 12: mod_base = OTHER; note = 2'-O-methyluridine-3'-phosphate
  modified_base 13: mod_base = OTHER; note = 2'-O-methylcytidine-3'-phosphate
  modified_base 14: mod_base = OTHER; note = 2'-O-methylcytidine-3'-phosphate
  modified_base 15: mod_base = OTHER; note = 2'-O-methyluridine-3'-phosphate
  modified_base 16: mod_base = OTHER; note = 2'-O-methyladenosine-3'-phosphate
  modified_base 17: mod_base = OTHER; note = 2'-O-methylguanosine-3'-phosphate
  modified_base 18: mod_base = OTHER; note = 2'-O-methyladenosine-3'-phosphate
  modified_base 19: mod_base = OTHER; note = 2'-O-methylguanosine-3'-phosphorothioate
  modified_base 20: mod_base = OTHER; note = 2'-O-methyluridine-3'-phosphorothioate
  modified_base 21: mod_base = OTHER; note = 2'-O-methyladenosine
aatattcttggtcctagagta

SEQ ID NO: 1368 - RNA, 21 nt, synthetic construct
  source 1..21: mol_type = other RNA
  modified_base 1: mod_base = OTHER; note = 2'-O-methyluridine-3'-phosphorothioate
  modified_base 2: mod_base = OTHER; note = 2'-O-methylguanosine-3'-phosphorothioate
  modified_base 3: mod_base = OTHER; note = 2'-O-methyladenosine-3'-phosphate
  modified_base 4: mod_base = OTHER; note = 2'-O-methyluridine-3'-phosphate
  modified_base 5: mod_base = OTHER; note = 2'-O-methyladenosine-3'-phosphate
  modified_base 6: mod_base = OTHER; note = 2'-O-hexadecyl-cytidine-3'-phosphate
  modified_base 7: mod_base = OTHER; note = 2'-deoxy-2'-fluoroadenosine-3'-phosphate
  modified_base 8: mod_base = OTHER; note = 2'-O-methylguanosine-3'-phosphate
  modified_base 9: mod_base = OTHER; note = 2'-deoxy-2'-fluorouridine-3'-phosphate
  modified_base 10: mod_base = OTHER; note = 2'-deoxy-2'-fluoroadenosine-3'-phosphate
  modified_base 11: mod_base = OTHER; note = 2'-deoxy-2'-fluorocytidine-3'-phosphate
  modified_base 12: mod_base = OTHER; note = 2'-O-methyluridine-3'-phosphate
  modified_base 13: mod_base = OTHER; note = 2'-O-methylcytidine-3'-phosphate
  modified_base 14: mod_base = OTHER; note = 2'-O-methyladenosine-3'-phosphate
  modified_base 15: mod_base = OTHER; note = 2'-O-methyladenosine-3'-phosphate
  modified_base 16: mod_base = OTHER; note = 2'-O-methyluridine-3'-phosphate
  modified_base 17: mod_base = OTHER; note = 2'-O-methylguanosine-3'-phosphate
  modified_base 18: mod_base = OTHER; note = 2'-O-methyladenosine-3'-phosphate
  modified_base 19: mod_base = OTHER; note = 2'-O-methyluridine-3'-phosphorothioate
  modified_base 20: mod_base = OTHER; note = 2'-O-methylguanosine-3'-phosphorothioate
  modified_base 21: mod_base = OTHER; note = 2'-O-methyladenosine
tgatacagtactcaatgatga

SEQ ID NO: 1369 - RNA, 21 nt, synthetic construct
  source 1..21: mol_type = other RNA
  modified_base 1: mod_base = OTHER; note = 2'-O-methyluridine-3'-phosphorothioate
  modified_base 2: mod_base = OTHER; note = 2'-O-methyladenosine-3'-phosphorothioate
  modified_base 3: mod_base = OTHER; note = 2'-O-methylguanosine-3'-phosphate
  modified_base 4: mod_base = OTHER; note = 2'-O-methylcytidine-3'-phosphate
  modified_base 5: mod_base = OTHER; note = 2'-O-methyluridine-3'-phosphate
  modified_base 6: mod_base = OTHER; note = 2'-O-hexadecyl-guanosine-3'-phosphate
  modified_base 7: mod_base = OTHER; note = 2'-deoxy-2'-fluoroadenosine-3'-phosphate
  modified_base 8: mod_base = OTHER; note = 2'-O-methyluridine-3'-phosphate
  modified_base 9: mod_base = OTHER; note = 2'-deoxy-2'-fluoroadenosine-3'-phosphate
  modified_base 10: mod_base = OTHER; note = 2'-deoxy-2'-fluorocytidine-3'-phosphate
  modified_base 11: mod_base = OTHER; note = 2'-deoxy-2'-fluoroadenosine-3'-phosphate
  modified_base 12: mod_base = OTHER; note = 2'-O-methylguanosine-3'-phosphate
  modified_base 13: mod_base = OTHER; note = 2'-O-methyluridine-3'-phosphate
  modified_base 14: mod_base = OTHER; note = 2'-O-methyladenosine-3'-phosphate
  modified_base 15: mod_base = OTHER; note = 2'-O-methylcytidine-3'-phosphate
  modified_base 16: mod_base = OTHER; note = 2'-O-methyluridine-3'-phosphate
  modified_base 17: mod_base = OTHER; note = 2'-O-methylcytidine-3'-phosphate
  modified_base 18: mod_base = OTHER; note = 2'-O-methyladenosine-3'-phosphate
  modified_base 19: mod_base = OTHER; note = 2'-O-methyladenosine-3'-phosphorothioate
  modified_base 20: mod_base = OTHER; note = 2'-O-methyluridine-3'-phosphorothioate
  modified_base 21: mod_base = OTHER; note = 2'-O-methyladenosine
tagctgatacagtactcaata

SEQ ID NO: 1370 - RNA, 21 nt, synthetic construct
  source 1..21: mol_type = other RNA
  modified_base 1: mod_base = OTHER; note = 2'-O-methylcytidine-3'-phosphorothioate
  modified_base 2: mod_base = OTHER; note = 2'-O-methyluridine-3'-phosphorothioate
  modified_base 3: mod_base = OTHER; note = 2'-O-methylguanosine-3'-phosphate
  modified_base 4: mod_base = OTHER; note = 2'-O-methyluridine-3'-phosphate
  modified_base 5: mod_base = OTHER; note = 2'-O-methylcytidine-3'-phosphate
  modified_base 6: mod_base = OTHER; note = 2'-O-hexadecyl-adenosine-3'-phosphate
  modified_base 7: mod_base = OTHER; note = 2'-deoxy-2'-fluorouridine-3'-phosphate
  modified_base 8: mod_base = OTHER; note = 2'-O-methylguanosine-3'-phosphate
  modified_base 9: mod_base = OTHER; note = 2'-deoxy-2'-fluoroadenosine-3'-phosphate
  modified_base 10: mod_base = OTHER; note = 2'-deoxy-2'-fluoroadenosine-3'-phosphate
  modified_base 11: mod_base = OTHER; note = 2'-deoxy-2'-fluoroguanosine-3'-phosphate
  modified_base 12: mod_base = OTHER; note = 2'-O-methylguanosine-3'-phosphate
  modified_base 13: mod_base = OTHER; note = 2'-O-methylcytidine-3'-phosphate
  modified_base 14: mod_base = OTHER; note = 2'-O-methyluridine-3'-phosphate
  modified_base 15: mod_base = OTHER; note = 2'-O-methyluridine-3'-phosphate
  modified_base 16: mod_base = OTHER; note = 2'-O-methyluridine-3'-phosphate
  modified_base 17: mod_base = OTHER; note = 2'-O-methylcytidine-3'-phosphate
  modified_base 18: mod_base = OTHER; note = 2'-O-methyluridine-3'-phosphate
  modified_base 19: mod_base = OTHER; note = 2'-O-methyluridine-3'-phosphorothioate
  modified_base 20: mod_base = OTHER; note = 2'-O-methylcytidine-3'-phosphorothioate
  modified_base 21: mod_base = OTHER; note = 2'-O-methyladenosine
ctgtcatgaaggctttcttca

SEQ ID NO: 1371 - RNA, 21 nt, synthetic construct
  source 1..21: mol_type = other RNA
  modified_base 1: mod_base = OTHER; note = 2'-O-methyladenosine-3'-phosphorothioate
  modified_base 2: mod_base = OTHER; note = 2'-O-methylcytidine-3'-phosphorothioate
  modified_base 3: mod_base = OTHER; note = 2'-O-methyladenosine-3'-phosphate
  modified_base 4: mod_base = OTHER; note = 2'-O-methyluridine-3'-phosphate
  modified_base 5: mod_base = OTHER; note = 2'-O-methyladenosine-3'-phosphate
  modified_base 6: mod_base = OTHER; note = 2'-O-hexadecyl-uridine-3'-phosphate
  modified_base 7: mod_base = OTHER; note = 2'-deoxy-2'-fluorouridine-3'-phosphate
  modified_base 8: mod_base = OTHER; note = 2'-O-methyluridine-3'-phosphate
  modified_base 9: mod_base = OTHER; note = 2'-deoxy-2'-fluoroadenosine-3'-phosphate
  modified_base 10: mod_base = OTHER; note = 2'-deoxy-2'-fluorouridine-3'-phosphate
  modified_base 11: mod_base = OTHER; note = 2'-deoxy-2'-fluoroadenosine-3'-phosphate
  modified_base 12: mod_base = OTHER; note = 2'-O-methyladenosine-3'-phosphate
  modified_base 13: mod_base = OTHER; note = 2'-O-methyluridine-3'-phosphate
  modified_base 14: mod_base = OTHER; note = 2'-O-methylcytidine-3'-phosphate
  modified_base 15: mod_base = OTHER; note = 2'-O-methyladenosine-3'-phosphate
  modified_base 16: mod_base = OTHER; note = 2'-O-methylguanosine-3'-phosphate
  modified_base 17: mod_base = OTHER; note = 2'-O-methylcytidine-3'-phosphate
  modified_base 18: mod_base = OTHER; note = 2'-O-methylguanosine-3'-phosphate
  modified_base 19: mod_base = OTHER; note = 2'-O-methyluridine-3'-phosphorothioate
  modified_base 20: mod_base = OTHER; note = 2'-O-methyladenosine-3'-phosphorothioate
  modified_base 21: mod_base = OTHER; note = 2'-O-methyladenosine
acatatttataatcagcgtaa

SEQ ID NO: 1372 - RNA, 21 nt, synthetic construct
  source 1..21: mol_type = other RNA
  modified_base 1: mod_base = OTHER; note = 2'-O-methylguanosine-3'-phosphorothioate
  modified_base 2: mod_base = OTHER; note = 2'-O-methyluridine-3'-phosphorothioate
  modified_base 3: mod_base = OTHER; note = 2'-O-methylcytidine-3'-phosphate
  modified_base 4: mod_base = OTHER; note = 2'-O-methyluridine-3'-phosphate
  modified_base 5: mod_base = OTHER; note = 2'-O-methyluridine-3'-phosphate
  modified_base 6: mod_base = OTHER; note = 2'-O-hexadecyl-adenosine-3'-phosphate
  modified_base 7: mod_base = OTHER; note = 2'-deoxy-2'-fluorocytidine-3'-phosphate
  modified_base 8: mod_base = OTHER; note = 2'-O-methyladenosine-3'-phosphate
  modified_base 9: mod_base = OTHER; note = 2'-deoxy-2'-fluorocytidine-3'-phosphate
  modified_base 10: mod_base = OTHER; note = 2'-deoxy-2'-fluoroadenosine-3'-phosphate
  modified_base 11: mod_base = OTHER; note = 2'-deoxy-2'-fluoroguanosine-3'-phosphate
  modified_base 12: mod_base = OTHER; note = 2'-O-methyladenosine-3'-phosphate
  modified_base 13: mod_base = OTHER; note = 2'-O-methylguanosine-3'-phosphate
  modified_base 14: mod_base = OTHER; note = 2'-O-methyladenosine-3'-phosphate
  modified_base 15: mod_base = OTHER; note = 2'-O-methylcytidine-3'-phosphate
  modified_base 16: mod_base = OTHER; note = 2'-O-methyladenosine-3'-phosphate
  modified_base 17: mod_base = OTHER; note = 2'-O-methylcytidine-3'-phosphate
  modified_base 18: mod_base = OTHER; note = 2'-O-methyluridine-3'-phosphate
  modified_base 19: mod_base = OTHER; note = 2'-O-methylcytidine-3'-phosphorothioate
  modified_base 20: mod_base = OTHER; note = 2'-O-methyluridine-3'-phosphorothioate
  modified_base 21: mod_base = OTHER; note = 2'-O-methyladenosine
gtcttacacagagacactcta

SEQ ID NO: 1373 - RNA, 23 nt, synthetic construct
  source 1..23: mol_type = other RNA
  modified_base 1: mod_base = OTHER; note = 2'-O-methyluridine-3'-phosphorothioate 5'-(E)-Vinylphosphonate
  modified_base 2: mod_base = OTHER; note = 2'-deoxy-2'-fluorouridine-3'-phosphorothioate
  modified_base 3: mod_base = OTHER; note = 2'-O-methyladenosine-3'-phosphate
  modified_base 4: mod_base = OTHER; note = 2'-O-methyluridine-3'-phosphate
  modified_base 5: mod_base = OTHER; note = 2'-O-methyladenosine-3'-phosphate
  modified_base 6: mod_base = OTHER; note = 2'-O-methyladenosine-3'-phosphate
  modified_base 7: mod_base = OTHER; note = Thymidine-glycol nucleic acid (GNA), S-Isomer
  modified_base 8: mod_base = OTHER; note = 2'-O-methyluridine-3'-phosphate
  modified_base 9: mod_base = OTHER; note = 2'-O-methylguanosine-3'-phosphate
  modified_base 10: mod_base = OTHER; note = 2'-O-methyladenosine-3'-phosphate
  modified_base 11: mod_base = OTHER; note = 2'-O-methyluridine-3'-phosphate
  modified_base 12: mod_base = OTHER; note = 2'-O-methyladenosine-3'-phosphate
  modified_base 13: mod_base = OTHER; note = 2'-O-methylguanosine-3'-phosphate
  modified_base 14: mod_base = OTHER; note = 2'-deoxy-2'-fluorouridine-3'-phosphate
  modified_base 15: mod_base = OTHER; note = 2'-O-methylcytidine-3'-phosphate
  modified_base 16: mod_base = OTHER; note = 2'-deoxy-2'-fluorocytidine-3'-phosphate
  modified_base 17: mod_base = OTHER; note = 2'-O-methyladenosine-3'-phosphate
  modified_base 18: mod_base = OTHER; note = 2'-O-methyluridine-3'-phosphate
  modified_base 19: mod_base = OTHER; note = 2'-O-methyladenosine-3'-phosphate
  modified_base 20: mod_base = OTHER; note = 2'-O-methyluridine-3'-phosphate
  modified_base 21: mod_base = OTHER; note = 2'-O-methylguanosine-3'-phosphorothioate
  modified_base 22: mod_base = OTHER; note = 2'-O-methyluridine-3'-phosphorothioate
  modified_base 23: mod_base = OTHER; note = 2'-O-methylguanosine
ttataattgatagtccatatgtg

SEQ ID NO: 1374 - RNA, 23 nt, synthetic construct
  source 1..23: mol_type = other RNA
  modified_base 1: mod_base = OTHER; note = 2'-O-methyluridine-3'-phosphorothioate 5'-(E)-Vinylphosphonate
  modified_base 2: mod_base = OTHER; note = 2'-deoxy-2'-fluorocytidine-3'-phosphorothioate
  modified_base 3: mod_base = OTHER; note = 2'-O-methyladenosine-3'-phosphate
  modified_base 4: mod_base = OTHER; note = 2'-O-methyladenosine-3'-phosphate
  modified_base 5: mod_base = OTHER; note = 2'-O-methyluridine-3'-phosphate
  modified_base 6: mod_base = OTHER; note = 2'-O-methylcytidine-3'-phosphate
  modified_base 7: mod_base = OTHER; note = Thymidine-glycol nucleic acid (GNA), S-Isomer
  modified_base 8: mod_base = OTHER; note = 2'-O-methylcytidine-3'-phosphate
  modified_base 9: mod_base = OTHER; note = 2'-O-methyluridine-3'-phosphate
  modified_base 10: mod_base = OTHER; note = 2'-O-methylguanosine-3'-phosphate
  modified_base 11: mod_base = OTHER; note = 2'-O-methyluridine-3'-phosphate
  modified_base 12: mod_base = OTHER; note = 2'-O-methylcytidine-3'-phosphate
  modified_base 13: mod_base = OTHER; note = 2'-O-methyluridine-3'-phosphate
  modified_base 14: mod_base = OTHER; note = 2'-deoxy-2'-fluorouridine-3'-phosphate
  modified_base 15: mod_base = OTHER; note = 2'-O-methylguanosine-3'-phosphate
  modified_base 16: mod_base = OTHER; note = 2'-deoxy-2'-fluoroguanosine-3'-phosphate
  modified_base 17: mod_base = OTHER; note = 2'-O-methylcytidine-3'-phosphate
  modified_base 18: mod_base = OTHER; note = 2'-O-methyladenosine-3'-phosphate
  modified_base 19: mod_base = OTHER; note = 2'-O-methyladenosine-3'-phosphate
  modified_base 20: mod_base = OTHER; note = 2'-O-methylcytidine-3'-phosphate
  modified_base 21: mod_base = OTHER; note = 2'-O-methyladenosine-3'-phosphorothioate
  modified_base 22: mod_base = OTHER; note = 2'-O-methylguanosine-3'-phosphorothioate
  modified_base 23: mod_base = OTHER; note = 2'-O-methylcytidine
tcaatctctgtcttggcaacagc

SEQ ID NO: 1375 - RNA, 23 nt, synthetic construct
  source 1..23: mol_type = other RNA
  modified_base 1: mod_base = OTHER; note = 2'-O-methyluridine-3'-phosphorothioate 5'-(E)-Vinylphosphonate
  modified_base 2: mod_base = OTHER; note = 2'-deoxy-2'-fluorouridine-3'-phosphorothioate
  modified_base 3: mod_base = OTHER; note = 2'-O-methyluridine-3'-phosphate
  modified_base 4: mod_base = OTHER; note = 2'-O-methyladenosine-3'-phosphate
  modified_base 5: mod_base = OTHER; note = 2'-O-methyladenosine-3'-phosphate
  modified_base 6: mod_base = OTHER; note = 2'-O-methyladenosine-3'-phosphate
  modified_base 7: mod_base = OTHER; note = Guanosine-glycol nucleic acid (GNA), S-isomer
  modified_base 8: mod_base = OTHER; note = 2'-O-methylcytidine-3'-phosphate
  modified_base 9: mod_base = OTHER; note = 2'-O-methyladenosine-3'-phosphate
  modified_base 10: mod_base = OTHER; note = 2'-O-methyladenosine-3'-phosphate
  modified_base 11: mod_base = OTHER; note = 2'-O-methyluridine-3'-phosphate
  modified_base 12: mod_base = OTHER; note = 2'-O-methylcytidine-3'-phosphate
  modified_base 13: mod_base = OTHER; note = 2'-O-methyluridine-3'-phosphate
  modified_base 14: mod_base = OTHER; note = 2'-deoxy-2'-fluorocytidine-3'-phosphate
  modified_base 15: mod_base = OTHER; note = 2'-O-methyluridine-3'-phosphate
  modified_base 16: mod_base = OTHER; note = 2'-deoxy-2'-fluoroguanosine-3'-phosphate
  modified_base 17: mod_base = OTHER; note = 2'-O-methyluridine-3'-phosphate
  modified_base 18: mod_base = OTHER; note = 2'-O-methylcytidine-3'-phosphate
  modified_base 19: mod_base = OTHER; note = 2'-O-methyluridine-3'-phosphate
  modified_base 20: mod_base = OTHER; note = 2'-O-methyluridine-3'-phosphate
  modified_base 21: mod_base = OTHER; note = 2'-O-methylguanosine-3'-phosphorothioate
  modified_base 22: mod_base = OTHER; note = 2'-O-methylguanosine-3'-phosphorothioate
  modified_base 23: mod_base = OTHER; note = 2'-O-methylcytidine
tttaaagcaatctctgtcttggc

SEQ ID NO: 1376 - RNA, 23 nt, synthetic construct
  source 1..23: mol_type = other RNA
  modified_base 1: mod_base = OTHER; note = 2'-O-methyluridine-3'-phosphorothioate 5'-(E)-Vinylphosphonate
  modified_base 2: mod_base = OTHER; note = 2'-deoxy-2'-fluorouridine-3'-phosphorothioate
  modified_base 3: mod_base = OTHER; note = 2'-O-methylcytidine-3'-phosphate
  modified_base 4: mod_base = OTHER; note = 2'-O-methylguanosine-3'-phosphate
  modified_base 5: mod_base = OTHER; note = 2'-O-methyladenosine-3'-phosphate
  modified_base 6: mod_base = OTHER; note = 2'-O-methyladenosine-3'-phosphate
  modified_base 7: mod_base = OTHER; note = Guanosine-glycol nucleic acid (GNA), S-isomer
  modified_base 8: mod_base = OTHER; note = 2'-O-methylguanosine-3'-phosphate
  modified_base 9: mod_base = OTHER; note = 2'-O-methyladenosine-3'-phosphate
  modified_base 10: mod_base = OTHER; note = 2'-O-methyluridine-3'-phosphate
  modified_base 11: mod_base = OTHER; note = 2'-O-methyluridine-3'-phosphate
  modified_base 12: mod_base = OTHER; note = 2'-O-methyluridine-3'-phosphate
  modified_base 13: mod_base = OTHER; note = 2'-O-methylcytidine-3'-phosphate
  modified_base 14: mod_base = OTHER; note = 2'-deoxy-2'-fluorouridine-3'-phosphate
  modified_base 15: mod_base = OTHER; note = 2'-O-methylcytidine-3'-phosphate
  modified_base 16: mod_base = OTHER; note = 2'-deoxy-2'-fluorocytidine-3'-phosphate
  modified_base 17: mod_base = OTHER; note = 2'-O-methyladenosine-3'-phosphate
  modified_base 18: mod_base = OTHER; note = 2'-O-methyluridine-3'-phosphate
  modified_base 19: mod_base = OTHER; note = 2'-O-methyluridine-3'-phosphate
  modified_base 20: mod_base = OTHER; note = 2'-O-methyluridine-3'-phosphate
  modified_base 21: mod_base = OTHER; note = 2'-O-methyladenosine-3'-phosphorothioate
  modified_base 22: mod_base = OTHER; note = 2'-O-methylguanosine-3'-phosphorothioate
  modified_base 23: mod_base = OTHER; note = 2'-O-methyladenosine
ttcgaaggatttctccatttaga

SEQ ID NO: 1377 - RNA, 23 nt, synthetic construct
  source 1..23: mol_type = other RNA
  modified_base 1: mod_base = OTHER; note = 2'-O-methyluridine-3'-phosphorothioate 5'-(E)-Vinylphosphonate
  modified_base 2: mod_base = OTHER; note = 2'-deoxy-2'-fluorouridine-3'-phosphorothioate
  modified_base 3: mod_base = OTHER; note = 2'-O-methylguanosine-3'-phosphate
  modified_base 4: mod_base = OTHER; note = 2'-O-methyluridine-3'-phosphate
  modified_base 5: mod_base = OTHER; note = 2'-O-methyluridine-3'-phosphate
  modified_base 6: mod_base = OTHER; note = 2'-O-methyladenosine-3'-phosphate
  modified_base 7: mod_base = OTHER; note = Adenosine-glycol nucleic acid (GNA), S-isomer
  modified_base 8: mod_base = OTHER; note = 2'-O-methyluridine-3'-phosphate
  modified_base 9: mod_base = OTHER; note = 2'-O-methylcytidine-3'-phosphate
  modified_base 10: mod_base = OTHER; note = 2'-O-methyluridine-3'-phosphate
  modified_base 11: mod_base = OTHER; note = 2'-O-methyladenosine-3'-phosphate
  modified_base 12: mod_base = OTHER; note = 2'-O-methyluridine-3'-phosphate
  modified_base 13: mod_base = OTHER; note = 2'-O-methylcytidine-3'-phosphate
  modified_base 14: mod_base = OTHER; note = 2'-deoxy-2'-fluoroadenosine-3'-phosphate
  modified_base 15: mod_base = OTHER; note = 2'-O-methyladenosine-3'-phosphate
  modified_base 16: mod_base = OTHER; note = 2'-deoxy-2'-fluorocytidine-3'-phosphate
  modified_base 17: mod_base = OTHER; note = 2'-O-methyladenosine-3'-phosphate
  modified_base 18: mod_base = OTHER; note = 2'-O-methylcytidine-3'-phosphate
  modified_base 19: mod_base = OTHER; note = 2'-O-methyladenosine-3'-phosphate
  modified_base 20: mod_base = OTHER; note = 2'-O-methylcytidine-3'-phosphate
  modified_base 21: mod_base = OTHER; note = 2'-O-methyladenosine-3'-phosphorothioate
  modified_base 22: mod_base = OTHER; note = 2'-O-methylcytidine-3'-phosphorothioate
  modified_base 23: mod_base = OTHER; note = 2'-O-methyluridine
ttgttaatctatcaacacacact

SEQ ID NO: 1378 - RNA, 23 nt, synthetic construct
  source 1..23: mol_type = other RNA
  modified_base 1: mod_base = OTHER; note = 2'-O-methyluridine-3'-phosphorothioate 5'-(E)-Vinylphosphonate
  modified_base 2: mod_base = OTHER; note = 2'-deoxy-2'-fluoroguanosine-3'-phosphorothioate
  modified_base 3: mod_base = OTHER; note = 2'-O-methyladenosine-3'-phosphate
  modified_base 4: mod_base = OTHER; note = 2'-O-methylguanosine-3'-phosphate
  modified_base 5: mod_base = OTHER; note = 2'-O-methylguanosine-3'-phosphate
  modified_base 6: mod_base = OTHER; note = 2'-O-methyluridine-3'-phosphate
  modified_base 7: mod_base = OTHER; note = Adenosine-glycol nucleic acid (GNA), S-isomer
  modified_base 8: mod_base = OTHER; note = 2'-O-methylguanosine-3'-phosphate
  modified_base 9: mod_base = OTHER; note = 2'-O-methyladenosine-3'-phosphate
  modified_base 10: mod_base = OTHER; note = 2'-O-methyladenosine-3'-phosphate
  modified_base 11: mod_base = OTHER; note = 2'-O-methyladenosine-3'-phosphate
  modified_base 12: mod_base = OTHER; note = 2'-O-methylcytidine-3'-phosphate
  modified_base 13: mod_base = OTHER; note = 2'-O-methyluridine-3'-phosphate
  modified_base 14: mod_base = OTHER; note = 2'-deoxy-2'-fluoroadenosine-3'-phosphate
  modified_base 15: mod_base = OTHER; note = 2'-O-methyladenosine-3'-phosphate
  modified_base 16: mod_base = OTHER; note = 2'-deoxy-2'-fluoroguanosine-3'-phosphate
  modified_base 17: mod_base = OTHER; note = 2'-O-methyluridine-3'-phosphate
  modified_base 18: mod_base = OTHER; note = 2'-O-methyluridine-3'-phosphate
  modified_base 19: mod_base = OTHER; note = 2'-O-methylcytidine-3'-phosphate
  modified_base 20: mod_base = OTHER; note = 2'-O-methyluridine-3'-phosphate
  modified_base 21: mod_base = OTHER; note = 2'-O-methylguanosine-3'-phosphorothioate
  modified_base 22: mod_base = OTHER; note = 2'-O-methyluridine-3'-phosphorothioate
  modified_base 23: mod_base = OTHER; note = 2'-O-methylcytidine
tgaggtagaaactaagttctgtc

SEQ ID NO: 1379 - RNA, 23 nt, synthetic construct
  source 1..23: mol_type = other RNA
  modified_base 1: mod_base = OTHER; note = 2'-O-methyluridine-3'-phosphorothioate 5'-(E)-Vinylphosphonate
  modified_base 2: mod_base = OTHER; note = 2'-deoxy-2'-fluoroadenosine-3'-phosphorothioate
  modified_base 3: mod_base = OTHER; note = 2'-O-methylguanosine-3'-phosphate
  modified_base 4: mod_base = OTHER; note = 2'-O-methylguanosine-3'-phosphate
  modified_base 5: mod_base = OTHER; note = 2'-O-methyluridine-3'-phosphate
  modified_base 6: mod_base = OTHER; note = 2'-O-methyladenosine-3'-phosphate
  modified_base 7: mod_base = OTHER; note = Guanosine-glycol nucleic acid (GNA), S-isomer
  modified_base 8: mod_base = OTHER; note = 2'-O-methyladenosine-3'-phosphate
  modified_base 9: mod_base = OTHER; note = 2'-O-methyladenosine-3'-phosphate
  modified_base 10: mod_base = OTHER; note = 2'-O-methyladenosine-3'-phosphate
  modified_base 11: mod_base = OTHER; note = 2'-O-methylcytidine-3'-phosphate
  modified_base 12: mod_base = OTHER; note = 2'-O-methyluridine-3'-phosphate
  modified_base 13: mod_base = OTHER; note = 2'-O-methyladenosine-3'-phosphate
  modified_base 14: mod_base = OTHER; note = 2'-deoxy-2'-fluoroadenosine-3'-phosphate
  modified_base 15: mod_base = OTHER; note = 2'-O-methylguanosine-3'-phosphate
  modified_base 16: mod_base = OTHER; note = 2'-deoxy-2'-fluorouridine-3'-phosphate
  modified_base 17: mod_base = OTHER; note = 2'-O-methyluridine-3'-phosphate
  modified_base 18: mod_base = OTHER; note = 2'-O-methylcytidine-3'-phosphate
  modified_base 19: mod_base = OTHER; note = 2'-O-methyluridine-3'-phosphate
  modified_base 20: mod_base = OTHER; note = 2'-O-methylguanosine-3'-phosphate
  modified_base 21: mod_base = OTHER; note = 2'-O-methyluridine-3'-phosphorothioate
  modified_base 22: mod_base = OTHER; note = 2'-O-methylcytidine-3'-phosphorothioate
  modified_base 23: mod_base = OTHER; note = 2'-O-methyluridine
taggtagaaactaagttctgtct

SEQ ID NO: 1380 - RNA, 23 nt, synthetic construct
  source 1..23: mol_type = other RNA
  modified_base 1: mod_base = OTHER; note = 2'-O-methyluridine-3'-phosphorothioate 5'-(E)-Vinylphosphonate
  modified_base 2: mod_base = OTHER; note = 2'-deoxy-2'-fluoroguanosine-3'-phosphorothioate
  modified_base 3: mod_base = OTHER; note = 2'-O-methyladenosine-3'-phosphate
  modified_base 4: mod_base = OTHER; note = 2'-O-methyladenosine-3'-phosphate
  modified_base 5: mod_base = OTHER; note = 2'-O-methylguanosine-3'-phosphate
  modified_base 6: mod_base = OTHER; note = 2'-O-methyluridine-3'-phosphate
  modified_base 7: mod_base = OTHER; note = Adenosine-glycol nucleic acid (GNA), S-isomer
  modified_base 8: mod_base = OTHER; note = 2'-O-methyluridine-3'-phosphate
  modified_base 9: mod_base = OTHER; note = 2'-O-methyladenosine-3'-phosphate
  modified_base 10: mod_base = OTHER; note = 2'-O-methyladenosine-3'-phosphate
  modified_base 11: mod_base = OTHER; note = 2'-O-methyluridine-3'-phosphate
  modified_base 12: mod_base = OTHER; note = 2'-O-methyluridine-3'-phosphate
  modified_base 13: mod_base = OTHER; note = 2'-O-methylguanosine-3'-phosphate
  modified_base 14: mod_base = OTHER; note = 2'-deoxy-2'-fluoroadenosine-3'-phosphate
  modified_base 15: mod_base = OTHER; note = 2'-O-methyluridine-3'-phosphate
  modified_base 16: mod_base = OTHER; note = 2'-deoxy-2'-fluoroadenosine-3'-phosphate
  modified_base 17: mod_base = OTHER; note = 2'-O-methylguanosine-3'-phosphate
  modified_base 18: mod_base = OTHER; note = 2'-O-methyluridine-3'-phosphate
  modified_base 19: mod_base = OTHER; note = 2'-O-methylcytidine-3'-phosphate
  modified_base 20: mod_base = OTHER; note = 2'-O-methylcytidine-3'-phosphate
  modified_base 21: mod_base = OTHER; note = 2'-O-methyladenosine-3'-phosphorothioate
  modified_base 22: mod_base = OTHER; note = 2'-O-methyluridine-3'-phosphorothioate
  modified_base 23: mod_base = OTHER; note = 2'-O-methyladenosine
tgaagtataattgatagtccata

SEQ ID NO: 1381 - RNA, 23 nt, synthetic construct
  source 1..23: mol_type = other RNA
  modified_base 1: mod_base = OTHER; note = 2'-O-methyluridine-3'-phosphorothioate 5'-(E)-Vinylphosphonate
  modified_base 2: mod_base = OTHER; note = 2'-deoxy-2'-fluoroguanosine-3'-phosphorothioate
  modified_base 3: mod_base = OTHER; note = 2'-O-methylguanosine-3'-phosphate
  modified_base 4: mod_base = OTHER; note = 2'-O-methylcytidine-3'-phosphate
  modified_base 5: mod_base = OTHER; note = 2'-O-methyladenosine-3'-phosphate
  modified_base 6: mod_base = OTHER; note = 2'-O-methyladenosine-3'-phosphate
  modified_base 7: mod_base = OTHER; note = Adenosine-glycol nucleic acid (GNA), S-isomer
  modified_base 8: mod_base = OTHER; note = 2'-O-methylguanosine-3'-phosphate
  modified_base 9: mod_base = OTHER; note = 2'-O-methyladenosine-3'-phosphate
  modified_base 10: mod_base = OTHER; note = 2'-O-methylguanosine-3'-phosphate
  modified_base 11: mod_base = OTHER; note = 2'-O-methyluridine-3'-phosphate
  modified_base 12: mod_base = OTHER; note = 2'-O-methylcytidine-3'-phosphate
  modified_base 13: mod_base = OTHER; note = 2'-O-methylguanosine-3'-phosphate
  modified_base 14: mod_base = OTHER; note = 2'-deoxy-2'-fluoroadenosine-3'-phosphate
  modified_base 15: mod_base = OTHER; note = 2'-O-methylcytidine-3'-phosphate
  modified_base 16: mod_base = OTHER; note = 2'-deoxy-2'-fluoroadenosine-3'-phosphate
  modified_base 17: mod_base = OTHER; note = 2'-O-methyluridine-3'-phosphate
  modified_base 18: mod_base = OTHER; note = 2'-O-methylcytidine-3'-phosphate
  modified_base 19: mod_base = OTHER; note = 2'-O-methyladenosine-3'-phosphate
  modified_base 20: mod_base = OTHER; note = 2'-O-methylcytidine-3'-phosphate
  modified_base 21: mod_base = OTHER; note = 2'-O-methyluridine-3'-phosphorothioate
  modified_base 22: mod_base = OTHER; note = 2'-O-methylguanosine-3'-phosphorothioate
  modified_base 23: mod_base = OTHER; note = 2'-O-methylcytidine
tggcaaagagtcgacatcactgc

SEQ ID NO: 1382 - RNA, 23 nt, synthetic construct
  source 1..23: mol_type = other RNA
  modified_base 1: mod_base = OTHER; note = 2'-O-methyluridine-3'-phosphorothioate 5'-(E)-Vinylphosphonate
  modified_base 2: mod_base = OTHER; note = 2'-deoxy-2'-fluorocytidine-3'-phosphorothioate
  modified_base 3: mod_base = OTHER; note = 2'-O-methyluridine-3'-phosphate
  modified_base 4: mod_base = OTHER; note = 2'-O-methyluridine-3'-phosphate
  modified_base 5: mod_base = OTHER; note = 2'-O-methyladenosine-3'-phosphate
  modified_base 6: mod_base = OTHER; note = 2'-O-methyladenosine-3'-phosphate
  modified_base 7: mod_base = OTHER; note = Adenosine-glycol nucleic acid (GNA), S-isomer
  modified_base 8: mod_base = OTHER; note = 2'-O-methylguanosine-3'-phosphate
  modified_base 9: mod_base = OTHER; note = 2'-O-methylcytidine-3'-phosphate
  modified_base 10: mod_base = OTHER; note = 2'-O-methyladenosine-3'-phosphate
  modified_base 11: mod_base = OTHER; note = 2'-O-methyladenosine-3'-phosphate
  modified_base 12: mod_base = OTHER; note = 2'-O-methyluridine-3'-phosphate
  modified_base 13: mod_base = OTHER; note = 2'-O-methylcytidine-3'-phosphate
  modified_base 14: mod_base = OTHER; note = 2'-deoxy-2'-fluorouridine-3'-phosphate
  modified_base 15: mod_base = OTHER; note = 2'-O-methylcytidine-3'-phosphate
  modified_base 16: mod_base = OTHER; note = 2'-deoxy-2'-fluorouridine-3'-phosphate
  modified_base 17: mod_base = OTHER; note = 2'-O-methylguanosine-3'-phosphate
  modified_base 18: mod_base = OTHER; note = 2'-O-methyluridine-3'-phosphate
  modified_base 19: mod_base = OTHER; note = 2'-O-methylcytidine-3'-phosphate
  modified_base 20: mod_base = OTHER; note = 2'-O-methyluridine-3'-phosphate
  modified_base 21: mod_base = OTHER; note = 2'-O-methyluridine-3'-phosphorothioate
  modified_base 22: mod_base = OTHER; note = 2'-O-methylguanosine-3'-phosphorothioate
  modified_base 23: mod_base = OTHER; note = 2'-O-methylguanosine
tcttaaagcaatctctgtcttgg

SEQ ID NO: 1383 - RNA, 23 nt, synthetic construct
  source 1..23: mol_type = other RNA
  modified_base 1: mod_base = OTHER; note = 2'-O-methyluridine-3'-phosphorothioate 5'-(E)-Vinylphosphonate
  modified_base 2: mod_base = OTHER; note = 2'-deoxy-2'-fluoroadenosine-3'-phosphorothioate
  modified_base 3: mod_base = OTHER; note = 2'-O-methylcytidine-3'-phosphate
  modified_base 4: mod_base = OTHER; note = 2'-O-methyluridine-3'-phosphate
  modified_base 5: mod_base = OTHER; note = 2'-O-methylcytidine-3'-phosphate
  modified_base 6: mod_base = OTHER; note = 2'-O-methyluridine-3'-phosphate
  modified_base 7: mod_base = OTHER; note = Adenosine-glycol nucleic acid (GNA), S-isomer
  modified_base 8: mod_base = OTHER; note = 2'-O-methylguanosine-3'-phosphate
  modified_base 9: mod_base = OTHER; note = 2'-O-methylguanosine-3'-phosphate
  modified_base 10: mod_base = OTHER; note = 2'-O-methyladenosine-3'-phosphate
  modified_base 11: mod_base = OTHER; note = 2'-O-methylcytidine-3'-phosphate
  modified_base 12: mod_base = OTHER; note = 2'-O-methylcytidine-3'-phosphate
  modified_base 13: mod_base = OTHER; note = 2'-O-methyladenosine-3'-phosphate
  modified_base 14: mod_base = OTHER; note = 2'-deoxy-2'-fluoroadenosine-3'-phosphate
  modified_base 15: mod_base = OTHER; note = 2'-O-methylguanosine-3'-phosphate
  modified_base 16: mod_base = OTHER; note = 2'-deoxy-2'-fluoroadenosine-3'-phosphate
  modified_base 17: mod_base = OTHER; note = 2'-O-methyladenosine-3'-phosphate
  modified_base 18: mod_base = OTHER; note = 2'-O-methyluridine-3'-phosphate
  modified_base 19: mod_base = OTHER; note = 2'-O-methyladenosine-3'-phosphate
  modified_base 20: mod_base = OTHER; note = 2'-O-methyluridine-3'-phosphate
  modified_base 21: mod_base = OTHER; note = 2'-O-methyluridine-3'-phosphorothioate
  modified_base 22: mod_base = OTHER; note = 2'-O-methylguanosine-3'-phosphorothioate
  modified_base 23: mod_base = OTHER; note = 2'-O-methyluridine
tactctaggaccaagaatattgt

SEQ ID NO: 1384 - RNA, 23 nt, synthetic construct
  source 1..23: mol_type = other RNA
  modified_base 1: mod_base = OTHER; note = 2'-O-methyluridine-3'-phosphorothioate 5'-(E)-Vinylphosphonate
  modified_base 2: mod_base = OTHER; note = 2'-deoxy-2'-fluorocytidine-3'-phosphorothioate
  modified_base 3: mod_base = OTHER; note = 2'-O-methyladenosine-3'-phosphate
  modified_base 4: mod_base = OTHER; note = 2'-O-methyluridine-3'-phosphate
  modified_base 5: mod_base = OTHER; note = 2'-O-methylcytidine-3'-phosphate
  modified_base 6: mod_base = OTHER; note = 2'-O-methyladenosine-3'-phosphate
  modified_base 7: mod_base = OTHER; note = Thymidine-glycol nucleic acid (GNA), S-Isomer
  modified_base 8: mod_base = OTHER; note = 2'-O-methyluridine-3'-phosphate
  modified_base 9: mod_base = OTHER; note = 2'-O-methylguanosine-3'-phosphate
  modified_base 10: mod_base = OTHER; note = 2'-O-methyladenosine-3'-phosphate
  modified_base 11: mod_base = OTHER; note = 2'-O-methylguanosine-3'-phosphate
  modified_base 12: mod_base = OTHER; note = 2'-O-methyluridine-3'-phosphate
  modified_base 13: mod_base = OTHER; note = 2'-O-methyladenosine-3'-phosphate
  modified_base 14: mod_base = OTHER; note = 2'-deoxy-2'-fluorocytidine-3'-phosphate
  modified_base 15: mod_base = OTHER; note = 2'-O-methyluridine-3'-phosphate
  modified_base 16: mod_base = OTHER; note = 2'-deoxy-2'-fluoroguanosine-3'-phosphate
  modified_base 17: mod_base = OTHER; note = 2'-O-methyluridine-3'-phosphate
  modified_base 18: mod_base = OTHER; note = 2'-O-methyladenosine-3'-phosphate
  modified_base 19: mod_base = OTHER; note = 2'-O-methyluridine-3'-phosphate
  modified_base 20: mod_base = OTHER; note = 2'-O-methylcytidine-3'-phosphate
  modified_base 21: mod_base = OTHER; note = 2'-O-methyladenosine-3'-phosphorothioate
  modified_base 22: mod_base = OTHER; note = 2'-O-methylguanosine-3'-phosphorothioate
  modified_base 23: mod_base = OTHER; note = 2'-O-methylcytidine
tcatcattgagtactgtatcagc

SEQ ID NO: 1385 - RNA, 23 nt, synthetic construct
  source 1..23: mol_type = other RNA
  modified_base 1: mod_base = OTHER; note = 2'-O-methyluridine-3'-phosphorothioate 5'-(E)-Vinylphosphonate
  modified_base 2: mod_base = OTHER; note = 2'-deoxy-2'-fluoroadenosine-3'-phosphorothioate
  modified_base 3: mod_base = OTHER; note = 2'-O-methyluridine-3'-phosphate
  modified_base 4: mod_base = OTHER; note = 2'-O-methyluridine-3'-phosphate
  modified_base 5: mod_base = OTHER; note = 2'-O-methylguanosine-3'-phosphate
  modified_base 6: mod_base = OTHER; note = 2'-O-methyladenosine-3'-phosphate
  modified_base 7: mod_base = OTHER; note = Guanosine-glycol nucleic acid (GNA), S-isomer
  modified_base 8: mod_base = OTHER; note = 2'-O-methyluridine-3'-phosphate
  modified_base 9: mod_base = OTHER; note = 2'-O-methyladenosine-3'-phosphate
  modified_base 10: mod_base = OTHER; note = 2'-O-methylcytidine-3'-phosphate
  modified_base 11: mod_base = OTHER; note = 2'-O-methyluridine-3'-phosphate
  modified_base 12: mod_base = OTHER; note = 2'-O-methylguanosine-3'-phosphate
  modified_base 13: mod_base = OTHER; note = 2'-O-methyluridine-3'-phosphate
  modified_base 14: mod_base = OTHER; note = 2'-deoxy-2'-fluoroadenosine-3'-phosphate
  modified_base 15: mod_base = OTHER; note = 2'-O-methyluridine-3'-phosphate
  modified_base 16: mod_base = OTHER; note = 2'-deoxy-2'-fluorocytidine-3'-phosphate
  modified_base 17: mod_base = OTHER; note = 2'-O-methyladenosine-3'-phosphate
  modified_base 18: mod_base = OTHER; note = 2'-O-methylguanosine-3'-phosphate
  modified_base 19: mod_base = OTHER; note = 2'-O-methylcytidine-3'-phosphate
  modified_base 20: mod_base = OTHER; note = 2'-O-methyluridine-3'-phosphate
  modified_base 21: mod_base = OTHER; note = 2'-O-methyladenosine-3'-phosphorothioate
  modified_base 22: mod_base = OTHER; note = 2'-O-methyluridine-3'-phosphorothioate
  modified_base 23: mod_base = OTHER; note = 2'-O-methyladenosine
tattgagtactgtatcagctata

SEQ ID NO: 1386 - RNA, 23 nt, synthetic construct
  source 1..23: mol_type = other RNA
  modified_base 1: mod_base = OTHER; note = 2'-O-methyluridine-3'-phosphorothioate 5'-(E)-Vinylphosphonate
  modified_base 2: mod_base = OTHER; note = 2'-deoxy-2'-fluoroguanosine-3'-phosphorothioate
  modified_base 3: mod_base = OTHER; note = 2'-O-methyladenosine-3'-phosphate
  modified_base 4: mod_base = OTHER; note = 2'-O-methyladenosine-3'-phosphate
  modified_base 5: mod_base = OTHER; note = 2'-O-methylguanosine-3'-phosphate
  modified_base 6: mod_base = OTHER; note = 2'-O-methyladenosine-3'-phosphate
  modified_base 7: mod_base = OTHER; note = Adenosine-glycol nucleic acid (GNA), S-isomer
  modified_base 8: mod_base = OTHER; note = 2'-O-methyladenosine-3'-phosphate
  modified_base 9: mod_base = OTHER; note = 2'-O-methylguanosine-3'-phosphate
  modified_base 10: mod_base = OTHER; note = 2'-O-methylcytidine-3'-phosphate
  modified_base 11: mod_base = OTHER; note = 2'-O-methylcytidine-3'-phosphate
  modified_base 12: mod_base = OTHER; note = 2'-O-methyluridine-3'-phosphate
  modified_base 13: mod_base = OTHER; note = 2'-O-methyluridine-3'-phosphate
  modified_base 14: mod_base = OTHER; note = 2'-deoxy-2'-fluorocytidine-3'-phosphate
  modified_base 15: mod_base = OTHER; note = 2'-O-methyladenosine-3'-phosphate
  modified_base 16: mod_base = OTHER; note = 2'-deoxy-2'-fluorouridine-3'-phosphate
  modified_base 17: mod_base = OTHER; note = 2'-O-methylguanosine-3'-phosphate
  modified_base 18: mod_base = OTHER; note = 2'-O-methyladenosine-3'-phosphate
  modified_base 19: mod_base = OTHER; note = 2'-O-methylcytidine-3'-phosphate
  modified_base 20: mod_base = OTHER; note = 2'-O-methyladenosine-3'-phosphate
  modified_base 21: mod_base = OTHER; note = 2'-O-methylguanosine-3'-phosphorothioate
  modified_base 22: mod_base = OTHER; note = 2'-O-methylcytidine-3'-phosphorothioate
  modified_base 23: mod_base = OTHER; note = 2'-O-methyluridine
tgaagaaagccttcatgacagct

SEQ ID NO: 1387 - RNA, 23 nt, synthetic construct
  source 1..23: mol_type = other RNA
  modified_base 1: mod_base = OTHER; note = 2'-O-methyluridine-3'-phosphorothioate 5'-(E)-Vinylphosphonate
  modified_base 2: mod_base = OTHER; note = 2'-deoxy-2'-fluorouridine-3'-phosphorothioate
  modified_base 3: mod_base = OTHER; note = 2'-O-methyladenosine-3'-phosphate
  modified_base 4: mod_base = OTHER; note = 2'-O-methylcytidine-3'-phosphate
  modified_base 5: mod_base = OTHER; note = 2'-O-methylguanosine-3'-phosphate
  modified_base 6: mod_base = OTHER; note = 2'-O-methylcytidine-3'-phosphate
  modified_base 7: mod_base = OTHER; note = Thymidine-glycol nucleic acid (GNA), S-Isomer
  modified_base 8: mod_base = OTHER; note = 2'-O-methylguanosine-3'-phosphate
  modified_base 9: mod_base = OTHER; note = 2'-O-methyladenosine-3'-phosphate
  modified_base 10: mod_base = OTHER; note = 2'-O-methyluridine-3'-phosphate
  modified_base 11: mod_base = OTHER; note = 2'-O-methyluridine-3'-phosphate
  modified_base 12: mod_base = OTHER; note = 2'-O-methyladenosine-3'-phosphate
  modified_base 13: mod_base = OTHER; note = 2'-O-methyluridine-3'-phosphate
  modified_base 14: mod_base = OTHER; note = 2'-deoxy-2'-fluoroadenosine-3'-phosphate
  modified_base 15: mod_base = OTHER; note = 2'-O-methyladenosine-3'-phosphate
  modified_base 16: mod_base = OTHER; note = 2'-deoxy-2'-fluoroadenosine-3'-phosphate
  modified_base 17: mod_base = OTHER; note = 2'-O-methyluridine-3'-phosphate
  modified_base 18: mod_base = OTHER; note = 2'-O-methyladenosine-3'-phosphate
  modified_base 19: mod_base = OTHER; note = 2'-O-methyluridine-3'-phosphate
  modified_base 20: mod_base = OTHER; note = 2'-O-methylguanosine-3'-phosphate
  modified_base 21: mod_base = OTHER; note = 2'-O-methyluridine-3'-phosphorothioate
  modified_base 22: mod_base = OTHER; note = 2'-O-methyluridine-3'-phosphorothioate
  modified_base 23: mod_base = OTHER; note = 2'-O-methylcytidine
ttacgctgattataaatatgttc

SEQ ID NO: 1388 - RNA, 23 nt, synthetic construct
  source 1..23: mol_type = other RNA
  modified_base 1: mod_base = OTHER; note = 2'-O-methyluridine-3'-phosphorothioate 5'-(E)-Vinylphosphonate
  modified_base 2: mod_base = OTHER; note = 2'-deoxy-2'-fluoroadenosine-3'-phosphorothioate
  modified_base 3: mod_base = OTHER; note = 2'-O-methylguanosine-3'-phosphate
  modified_base 4: mod_base = OTHER; note = 2'-O-methyladenosine-3'-phosphate
  modified_base 5: mod_base = OTHER; note = 2'-O-methylguanosine-3'-phosphate
  modified_base 6: mod_base = OTHER; note = 2'-O-methyluridine-3'-phosphate
  modified_base 7: mod_base = OTHER; note = Guanosine-glycol nucleic acid (GNA), S-isomer
  modified_base 8: mod_base = OTHER; note = 2'-O-methyluridine-3'-phosphate
  modified_base 9: mod_base = OTHER; note = 2'-O-methylcytidine-3'-phosphate
  modified_base 10: mod_base = OTHER; note = 2'-O-methyluridine-3'-phosphate
  modified_base 11: mod_base = OTHER; note = 2'-O-methylcytidine-3'-phosphate
  modified_base 12: mod_base = OTHER; note = 2'-O-methyluridine-3'-phosphate
  modified_base 13: mod_base = OTHER; note = 2'-O-methylguanosine-3'-phosphate
  modified_base 14: mod_base = OTHER; note = 2'-deoxy-2'-fluorouridine-3'-phosphate
  modified_base 15: mod_base = OTHER; note = 2'-O-methylguanosine-3'-phosphate
  modified_base 16: mod_base = OTHER; note = 2'-deoxy-2'-fluorouridine-3'-phosphate
  modified_base 17: mod_base = OTHER; note = 2'-O-methyladenosine-3'-phosphate
  modified_base 18: mod_base = OTHER; note = 2'-O-methyladenosine-3'-phosphate
  modified_base 19: mod_base = OTHER; note = 2'-O-methylguanosine-3'-phosphate
  modified_base 20: mod_base = OTHER; note = 2'-O-methyladenosine-3'-phosphate
  modified_base 21: mod_base = OTHER; note = 2'-O-methylcytidine-3'-phosphorothioate
  modified_base 22: mod_base = OTHER; note = 2'-O-methyladenosine-3'-phosphorothioate
  modified_base 23: mod_base = OTHER; note = 2'-O-methyluridine
tagagtgtctctgtgtaagacat

SEQ ID NO: 1389 - RNA, 23 nt, synthetic construct
  source 1..23: mol_type = other RNA
cacatatggactatcaattatac

SEQ ID NO: 1390 - RNA, 23 nt, synthetic construct
  source 1..23: mol_type = other RNA
gctgttgccaagacagagattgc

SEQ ID NO: 1391 - RNA, 23 nt, synthetic construct
  source 1..23: mol_type = other RNA
gccaagacagagattgctttaag

SEQ ID NO: 1392 - RNA, 23 nt, synthetic construct
  source 1..23: mol_type = other RNA
tctaaatggagaaatccttcgaa

SEQ ID NO: 1393 - RNA, 23 nt, synthetic construct
  source 1..23: mol_type = other RNA
agtgtgtgttgatagattaacac

SEQ ID NO: 1394 - RNA, 23 nt, synthetic construct
  source 1..23: mol_type = other RNA
gacagaacttagtttctacctcc

SEQ ID NO: 1395 - RNA, 23 nt, synthetic construct
  source 1..23: mol_type = other RNA
agacagaacttagtttctacctc

SEQ ID NO: 1396 - RNA, 23 nt, synthetic construct
  source 1..23: mol_type = other RNA
tatggactatcaattatacttcc

SEQ ID NO: 1397 - RNA, 23 nt, synthetic construct
  source 1..23: mol_type = other RNA
gcagtgatgtcgactctttgccc

SEQ ID NO: 1398 - RNA, 23 nt, synthetic construct
  source 1..23: mol_type = other RNA
ccaagacagagattgctttaagt

SEQ ID NO: 1399 - RNA, 23 nt, synthetic construct
  source 1..23: mol_type = other RNA
acaatattcttggtcctagagta

SEQ ID NO: 1400 - RNA, 23 nt, synthetic construct
  source 1..23: mol_type = other RNA
gctgatacagtactcaatgatga

SEQ ID NO: 1401 - RNA, 23 nt, synthetic construct
  source 1..23: mol_type = other RNA
tatagctgatacagtactcaatg

SEQ ID NO: 1402 - RNA, 23 nt, synthetic construct
  source 1..23: mol_type = other RNA
agctgtcatgaaggctttcttct

SEQ ID NO: 1403 - RNA, 23 nt, synthetic construct
  source 1..23: mol_type = other RNA
gaacatatttataatcagcgtag

SEQ ID NO: 1404 - RNA, 23 nt, synthetic construct
  source 1..23: mol_type = other RNA
atgtcttacacagagacactcta

SEQ ID NO: 1405 - RNA, 21 nt, synthetic construct
  source 1..21: mol_type = other RNA
  modified_base 1: mod_base = OTHER; note = 2'-O-methylcytidine-3'-phosphorothioate
  modified_base 2: mod_base = OTHER; note = 2'-O-methyluridine-3'-phosphorothioate
  modified_base 3: mod_base = OTHER; note = 2'-O-methyluridine-3'-phosphate
  modified_base 4: mod_base = OTHER; note = 2'-O-methyluridine-3'-phosphate
  modified_base 5: mod_base = OTHER; note = 2'-O-methyladenosine-3'-phosphate
  modified_base 6: mod_base = OTHER; note = 2'-O-hexadecyl-uridine-3'-phosphate
  modified_base 7: mod_base = OTHER; note = 2'-deoxy-2'-fluorocytidine-3'-phosphate
  modified_base 8: mod_base = OTHER; note = 2'-O-methyladenosine-3'-phosphate
  modified_base 9: mod_base = OTHER; note = 2'-deoxy-2'-fluoroguanosine-3'-phosphate
  modified_base 10: mod_base = OTHER; note = 2'-deoxy-2'-fluoroguanosine-3'-phosphate
  modified_base 11: mod_base = OTHER; note = 2'-deoxy-2'-fluorouridine-3'-phosphate
  modified_base 12: mod_base = OTHER; note = 2'-O-methylcytidine-3'-phosphate
  modified_base 13: mod_base = OTHER; note = 2'-O-methyluridine-3'-phosphate
  modified_base 14: mod_base = OTHER; note = 2'-O-methyluridine-3'-phosphate
  modified_base 15: mod_base = OTHER; note = 2'-O-methyluridine-3'-phosphate
  modified_base 16: mod_base = OTHER; note = 2'-O-methyluridine-3'-phosphate
  modified_base 17: mod_base = OTHER; note = 2'-O-methylcytidine-3'-phosphate
  modified_base 18: mod_base = OTHER; note = 2'-O-methyluridine-3'-phosphate
  modified_base 19: mod_base = OTHER; note = 2'-O-methyluridine-3'-phosphate
  modified_base 20: mod_base = OTHER; note = 2'-O-methylguanosine-3'-phosphate
  modified_base 21: mod_base = OTHER; note = 2'-O-methyladenosine-3'-phosphate ((2S,4R)-1-[29-[[2-(acetylamino)-2-deoxy-beta-D-galactopyra nosyl]oxy]-14,14-bis[[3-[[3-[[5-[[2-(acetylamino)-2-deoxy-b eta-D-galactopyranosyl]oxy]-1-oxopentyl]amino]propyl]amino] -3-oxopropoxy]methyl]-1,12,19,25-tetraoxo-16-oxa-13,20,24-t riazanonacos-1-yl]-4-hydroxy-2-pyrrolidinyl)methyl ester
ctttatcaggtcttttcttga

SEQ ID NO: 1406 - RNA, 21 nt, synthetic construct
  source 1..21: mol_type = other RNA
  modified_base 1: mod_base = OTHER; note = 2'-O-methyluridine-3'-phosphorothioate
  modified_base 2: mod_base = OTHER; note = 2'-O-methyluridine-3'-phosphorothioate
  modified_base 3: mod_base = OTHER; note = 2'-O-methylcytidine-3'-phosphate
  modified_base 4: mod_base = OTHER; note = 2'-O-methyluridine-3'-phosphate
  modified_base 5: mod_base = OTHER; note = 2'-O-methylguanosine-3'-phosphate
  modified_base 6: mod_base = OTHER; note = 2'-O-hexadecyl-guanosine-3'-phosphate
  modified_base 7: mod_base = OTHER; note = 2'-deoxy-2'-fluorouridine-3'-phosphate
  modified_base 8: mod_base = OTHER; note = 2'-O-methyluridine-3'-phosphate
  modified_base 9: mod_base = OTHER; note = 2'-deoxy-2'-fluoroadenosine-3'-phosphate
  modified_base 10: mod_base = OTHER; note = 2'-deoxy-2'-fluoroadenosine-3'-phosphate
  modified_base 11: mod_base = OTHER; note = 2'-deoxy-2'-fluorouridine-3'-phosphate
  modified_base 12: mod_base = OTHER; note = 2'-O-methylcytidine-3'-phosphate
  modified_base 13: mod_base = OTHER; note = 2'-O-methyluridine-3'-phosphate
  modified_base 14: mod_base = OTHER; note = 2'-O-methyluridine-3'-phosphate
  modified_base 15: mod_base = OTHER; note = 2'-O-methyluridine-3'-phosphate
  modified_base 16: mod_base = OTHER; note = 2'-O-methyladenosine-3'-phosphate
  modified_base 17: mod_base = OTHER; note = 2'-O-methyluridine-3'-phosphate
  modified_base 18: mod_base = OTHER; note = 2'-O-methylcytidine-3'-phosphate
  modified_base 19: mod_base = OTHER; note = 2'-O-methyladenosine-3'-phosphate
  modified_base 20: mod_base = OTHER; note = 2'-O-methylguanosine-3'-phosphate
  modified_base 21: mod_base = OTHER; note = 2'-O-methyladenosine-3'-phosphate ((2S,4R)-1-[29-[[2-(acetylamino)-2-deoxy-beta-D-galactopyra nosyl]oxy]-14,14-bis[[3-[[3-[[5-[[2-(acetylamino)-2-deoxy-b eta-D-galactopyranosyl]oxy]-1-oxopentyl]amino]propyl]amino] -3-oxopropoxy]methyl]-1,12,19,25-tetraoxo-16-oxa-13,20,24-t riazanonacos-1-yl]-4-hydroxy-2-pyrrolidinyl)methyl ester
ttctggttaatctttatcaga

SEQ ID NO: 1407 - RNA, 21 nt, synthetic construct
  source 1..21: mol_type = other RNA
  modified_base 1: mod_base = OTHER; note = 2'-O-methylcytidine-3'-phosphorothioate
  modified_base 2: mod_base = OTHER; note = 2'-O-methyluridine-3'-phosphorothioate
  modified_base 3: mod_base = OTHER; note = 2'-O-methyluridine-3'-phosphate
  modified_base 4: mod_base = OTHER; note = 2'-O-methylguanosine-3'-phosphate
  modified_base 5: mod_base = OTHER; note = 2'-O-methyluridine-3'-phosphate
  modified_base 6: mod_base = OTHER; note = 2'-O-hexadecyl-uridine-3'-phosphate
  modified_base 7: mod_base = OTHER; note = 2'-deoxy-2'-fluorouridine-3'-phosphate
  modified_base 8: mod_base = OTHER; note = 2'-O-methyluridine-3'-phosphate
  modified_base 9: mod_base = OTHER; note = 2'-deoxy-2'-fluorocytidine-3'-phosphate
  modified_base 10: mod_base = OTHER; note = 2'-deoxy-2'-fluorouridine-3'-phosphate
  modified_base 11: mod_base = OTHER; note = 2'-deoxy-2'-fluorouridine-3'-phosphate
  modified_base 12: mod_base = OTHER; note = 2'-O-methylcytidine-3'-phosphate
  modified_base 13: mod_base = OTHER; note = 2'-O-methyluridine-3'-phosphate
  modified_base 14: mod_base = OTHER; note = 2'-O-methylguanosine-3'-phosphate
  modified_base 15: mod_base = OTHER; note = 2'-O-methylguanosine-3'-phosphate
  modified_base 16: mod_base = OTHER; note = 2'-O-methyluridine-3'-phosphate
  modified_base 17: mod_base = OTHER; note = 2'-O-methyluridine-3'-phosphate
  modified_base 18: mod_base = OTHER; note = 2'-O-methyladenosine-3'-phosphate
  modified_base 19: mod_base = OTHER; note = 2'-O-methyladenosine-3'-phosphate
  modified_base 20: mod_base = OTHER; note = 2'-O-methyluridine-3'-phosphate
  modified_base 21: mod_base = OTHER; note = 2'-O-methyladenosine-3'-phosphate ((2S,4R)-1-[29-[[2-(acetylamino)-2-deoxy-beta-D-galactopyra nosyl]oxy]-14,14-bis[[3-[[3-[[5-[[2-(acetylamino)-2-deoxy-b eta-D-galactopyranosyl]oxy]-1-oxopentyl]amino]propyl]amino] -3-oxopropoxy]methyl]-1,12,19,25-tetraoxo-16-oxa-13,20,24-t riazanonacos-1-yl]-4-hydroxy-2-pyrrolidinyl)methyl ester
cttgttttcttctggttaata

SEQ ID NO: 1408 - RNA, 23 nt, synthetic construct
  source 1..23: mol_type = other RNA
tttcgcctctagcgactggtgga

SEQ ID NO: 1409 - RNA, 23 nt, synthetic construct
  source 1..23: mol_type = other RNA
ttctctgaccgaagctgggtgtc

SEQ ID NO: 1410 - RNA, 23 nt, synthetic construct
  source 1..23: mol_type = other RNA
tctcatttctctgaccgaagctg

SEQ ID NO: 1411 - RNA, 23 nt, synthetic construct
  source 1..23: mol_type = other RNA
ttccctctcatttctctgaccga

SEQ ID NO: 1412 - RNA, 23 nt, synthetic construct
  source 1..23: mol_type = other RNA
tgaacaagaaaagacctgataaa

SEQ ID NO: 1413 - RNA, 23 nt, synthetic construct
  source 1..23: mol_type = other RNA
tccaccagtcgctagaggcgaaa

SEQ ID NO: 1414 - RNA, 23 nt, synthetic construct
  source 1..23: mol_type = other RNA
tcggtcagagaaatgagagggaa

SEQ ID NO: 1415 - RNA, 23 nt, synthetic construct
  source 1..23: mol_type = other RNA
tccagagcttgctacaggctgcg

SEQ ID NO: 1416 - RNA, 23 nt, synthetic construct
  source 1..23: mol_type = other RNA
tttcttctggttaatctttatca

SEQ ID NO: 1417 - RNA, 23 nt, synthetic construct
  source 1..23: mol_type = other RNA
ttcttctggttaatctttatcag

SEQ ID NO: 1418 - RNA, 23 nt, synthetic construct
  source 1..23: mol_type = other RNA
tctggttaatctttatcaggtct

SEQ ID NO: 1419 - RNA, 23 nt, synthetic construct
  source 1..23: mol_type = other RNA
ttaatctttatcaggtcttttct

SEQ ID NO: 1420 - RNA, 23 nt, synthetic construct
  source 1..23: mol_type = other RNA
taatctttatcaggtcttttctt

SEQ ID NO: 1421 - RNA, 23 nt, synthetic construct
  source 1..23: mol_type = other RNA
aatctttatcaggtcttttcttg

SEQ ID NO: 1422 - RNA, 23 nt, synthetic construct
  source 1..23: mol_type = other RNA
tttatcaggtcttttcttgttca

1. A double stranded ribonucleic acid (dsRNA) agent for reducing the level of a C9orf72 antisense RNA transcript,
a) wherein the dsRNA agent comprises a sense strand and an antisense strand forming a double stranded region,
wherein the sense strand comprises at least 15 contiguous nucleotides differing by no more than 3 nucleotides from the nucleotide sequence of SEQ ID NO: 17, and the antisense strand comprises a nucleotide sequence comprising at least 15 contiguous nucleotides differing by no more than 3 nucleotides from the corresponding portion of the nucleotide sequence of SEQ ID NO:18; and
wherein the sense strand, the antisense strand, or both the sense strand and the antisense strand comprises at least one modified nucleotide;
b) wherein the dsRNA agent comprises a sense strand and an antisense strand forming a double stranded region,
wherein the sense strand comprises at least 15 contiguous nucleotides differing by no more than 3 nucleotides from the nucleotide sequence of SEQ ID NO:19, and the antisense strand comprises a nucleotide sequence comprising at least 15 contiguous nucleotides differing by no more than 3 nucleotides from the corresponding portion of the nucleotide sequence of SEQ ID NO:20; and
wherein the sense strand, the antisense strand, or both the sense strand and the antisense strand comprises at least one modified nucleotide;
c) wherein the dsRNA agent comprises a sense strand and an antisense strand forming a double stranded region,
wherein the sense strand or the antisense strand is a sense strand or an antisense strand selected from the group consisting of any of the sense strands and antisense strands in any one of Tables 2, 3, 10A, 10C, 11, and 12; and
wherein the sense strand, the antisense strand, or both the sense strand and the antisense strand comprises at least one modified nucleotide;
d) wherein the dsRNA agent comprises a sense strand and an antisense strand forming a double stranded region,
wherein the sense strand comprises at least 15 contiguous nucleotides differing by no more than three nucleotides from nucleotides 27573296-27573318; 27573314-27573336; 27573319-27573341; 27573562-27573584; 27573585-27573607; 27573592-27573614; 27573599-27573621; 27573608-27573630; 27573616-27573638; 27573619-27573641; 27573622-27573644; 27573633-27573655; 27573690-27573712; or 27573717-27573739 of SEQ ID NO: 13; and
wherein the sense strand, the antisense strand, or both the sense strand and the antisense strand comprises at least one modified nucleotide;
e) wherein the dsRNA agent comprises a sense strand and an antisense strand forming a double stranded region,
wherein the antisense strand comprises at least 15 contiguous nucleotides differing by no more than 3 nucleotides from any one of the antisense nucleotide sequences in any one of Tables 5, 6, 10B, and 10D; and
wherein the sense strand, the antisense strand, or both the sense strand and the antisense strand comprises at least one modified nucleotide;
f) wherein said dsRNA comprises a sense strand and an antisense strand forming a double stranded region,
wherein the sense strand comprises at least 15 contiguous nucleotides differing by no more than three nucleotides from any one of the nucleotide sequence of nucleotides 1-23; 15-37; 33-55; 37-59; 59-81, 62-84, or 62-91 of SEQ ID NO: 1, and the antisense strand comprises at least 15 contiguous nucleotides from the corresponding nucleotide sequence of SEQ ID NO:5; and
wherein the sense strand, the antisense strand, or both the sense strand and the antisense strand comprises at least one modified nucleotide;
g) wherein said dsRNA comprises a sense strand and an antisense strand forming a double stranded region,
wherein the sense strand comprises at least 15 contiguous nucleotides differing by no more than three nucleotides from any one of the nucleotide sequence of nucleotides 5197-5219; 5213-5235; 5223-5245, 5226-5248; 5227-5249, 5228-5250, 5229-5251, 5230-5252, 5231-5253, 5233-5255; 5235-5256, 5241-5263; 5245-5267; 5248-5270; 5539-5561; 5547-5569; 5917-5939; 5936-5958; 5954-5976; 6008-6030; 6021-6043; 6036-6058; 6043-6065; or 6048-6070 of SEQ ID NO: 15, and the antisense strand comprises at least 15 contiguous nucleotides from the corresponding nucleotide sequence of SEQ ID NO: 16; and
wherein the sense strand, the antisense strand, or both the sense strand and the antisense strand comprises at least one modified nucleotide;
h) wherein said dsRNA comprises a sense strand and an antisense strand forming a double stranded region,
wherein the sense strand comprises at least 15 contiguous nucleotides differing by no more than three nucleotides from any one of the nucleotide sequence of nucleotides 5015-5052; 5017-5040; 5032-5059; 5032-5055; 5033-5055; 5035-5059; 5036-5059; 5058-5087; 5059-5087; 5059-5084; 5064-5087; 5197-5222; 5213-5267; 5223-5252; 5229-5252; 5233-5263; 5516-5570; 5539-5565; 5539-5562; 5545-5570; 5545-5569; 5593-5616; 5883-5950; 5917-5950; 5919-5950; 5923-5950; 5934-5977; 5934-5957; 5938-5977; 5938-5965; 5938-5961; 5947-5977; 5947-5973; 5972-6001; 5973-5997; 6006-6029; 6011-6070; 6011-6039; 6011-6038; 6015-6038; 6019-6045; 6019-6042; 6033-6070; 6035-6065; 6035-6059; or 6040-6063 of SEQ ID NO: 15, and the antisense strand comprises at least 15 contiguous nucleotides from the corresponding nucleotide sequence of SEQ ID NO: 16; and
wherein the sense strand, the antisense strand, or both the sense strand and the antisense strand comprises at least one modified nucleotide;
i) wherein said dsRNA comprises a sense strand and an antisense strand forming a double stranded region,
wherein the sense strand comprises at least 15 contiguous nucleotides differing by no more than three nucleotides from any one of the nucleotide sequence of nucleotides 15-52; 17-40; 32-59; 32-55; 35-59; 36-59; 58-87; 59-87; 59-84; or 64-87 of SEQ ID NO: 1, and the antisense strand comprises at least 15 contiguous nucleotides from the corresponding nucleotide sequence of SEQ ID NO:5; and
wherein the sense strand, the antisense strand, or both the sense strand and the antisense strand comprises at least one modified nucleotide;
j) wherein said dsRNA comprises a sense strand and an antisense strand forming a double stranded region,
wherein the sense strand comprises at least 15 contiguous nucleotides differing by no more than three nucleotides from any one of the nucleotide sequence of nucleotides 27573296-27573584; 27573296-27573575; 27573301-27573338; 27573318-27573342; 27573555-27573583; 27573581-27573607; 27573584-27573607; 27573588-27573671; 27573588-MEI 47704194v.1 27573666; 27573588-27573624; 27573592-27573624; 27573592-27573617; 27573598-27573624; 27573599-27573623; 27573606-27573655; 27573606-27573652; 27573606-27573647; 27573654-27573712; or 27573707-27573740 of SEQ ID NO: 13, and the antisense strand comprises at least 15 contiguous nucleotides from the corresponding nucleotide sequence of SEQ ID NO: 14; and
wherein the sense strand, the antisense strand, or both the sense strand and the antisense strand comprises at least one modified nucleotide; or
k) wherein the dsRNA agent comprises a sense strand and an antisense strand forming a double stranded region,
wherein the antisense strand comprises at least 15 contiguous nucleotides differing by no more than 3 nucleotides from any one of the antisense nucleotide sequences in any one of Tables 8 and 9; and
wherein the sense strand, the antisense strand, or both the sense strand and the antisense strand comprises at least one modified nucleotide.

2-16. (canceled)

17. The dsRNA agent of claim 1, wherein the sense strand, the antisense strand, or both the sense strand and the antisense strand is conjugated to one or more lipophilic moieties.

18. The dsRNA agent of claim 17, wherein the lipophilic moiety is conjugated to one or more internal positions in the double stranded region of the dsRNA agent.

19.-23. (canceled)

24. The dsRNA agent of claim 1, wherein all of the nucleotides of the sense strand and all of the nucleotides of the antisense strand comprise a nucleotide modification are modified nucleotides.

25. The dsRNA agent of claim 24, wherein at least one of the nucleotide modifications is selected from the group consisting of a deoxy-nucleotide modification, a 3′-terminal deoxy-thymine (dT) nucleotide modification, a 2′—O-methyl nucleotide modification, a 2′-fluoro nucleotide modification, a 2′-deoxy nucleotide modification, a 2′—O-hexadecyl nucleotide modification, a 2′-phosphate nucleotide modification, a 2′-5′-linked ribonucleotide (3′-RNA) modification, a locked nucleotide modification, an unlocked nucleotide modification, a conformationally restricted nucleotide modification, a constrained ethyl nucleotide modification, an abasic nucleotide modification, an inverted abasic residue modification, a 2′-amino nucleotide modification, a 2′—O-allyl nucleotide modification, 2′-C-alkyl nucleotide modification, 2′-hydroxy nucleotide modification, a 2′-methoxyethyl nucleotide modification, a 2′—O-alkyl nucleotide modification, 2′,3′-seco nucleotide modification, a morpholino nucleotide modification, a phosphoramidate modification, a non-natural base comprising nucleotide modification, a tetrahydropyran nucleotide modification, a 1,5-anhydrohexitol nucleotide modification, a cyclohexenyl nucleotide modification, a nucleotide comprising a 5′-phosphorothioate group modification, a nucleotide comprising a 5′-methylphosphonate group modification, a nucleotide comprising a 5′ phosphate or 5′ phosphate mimic modification, a nucleotide comprising vinyl phosphonate modification, a nucleotide comprising glycol nucleic acid (GNA) modification, a nucleotide comprising a glycol nucleic acid S-Isomer (S-GNA) modification, a nucleotide comprising 2-hydroxymethyl-tetrahydrofuran-5-phosphate modification, a nucleotide comprising 2′-deoxythymidine-3′phosphate modification, a nucleotide comprising 2′-deoxyguanosine-3′-phosphate modification, and a terminal nucleotide linked to a cholesteryl derivative and a dodecanoic acid bisdecylamide group modification; and combinations thereof.

26-28. (canceled)

29. The dsRNA agent of claim 1, comprising at least one phosphorothioate internucleotide linkage.

30. (canceled)

31. The dsRNA agent of claim 1, wherein each strand is no more than 30 nucleotides in length.

32. (canceled)

33. (canceled)

34. The dsRNA agent of claim 1, wherein the double stranded region is 15-30 nucleotide pairs in length.

35-51. (canceled)

52. The dsRNA agent of claim 18, wherein the one or more lipophilic moieties are conjugated to one or more of the internal positions selected from the group consisting of positions 4-8 and 13-18 on the sense strand, and positions 6-10 and 15-18 on the antisense strand, counting from the 5′-end-5′end of each strand.

53-61. (canceled)

62. The dsRNA agent of claim 18, wherein the lipophilic moiety contains a saturated or unsaturated C4-C30 hydrocarbon chain, and an optional functional group selected from the group consisting of hydroxyl, amine, carboxylic acid, sulfonate, phosphate, thiol, azide, and alkyne.

63-78. (canceled)

79. The dsRNA agent of claim 1, further comprising a phosphate or phosphate mimic at the 5′-end of the antisense strand.

80-82. (canceled)

83. A cell containing the dsRNA agent of claim 1.

84. A pharmaceutical composition for inhibiting expression of a C9orf72, comprising the dsRNA agent of claim 1.

85-90. (canceled)

91. A composition comprising two or more double stranded ribonucleic acid (dsRNA) agents for inhibiting expression of C9orf72,
wherein each dsRNA agent independently comprises a sense strand and an antisense strand forming a double stranded region,
wherein a first dsRNA agent targeting the antisense strand of C9orf72 is selected from the group consisting of
a) a dsRNA agent comprising a sense strand comprising at least 15 contiguous nucleotides differing by no more than 3 nucleotides from the nucleotide sequence of SEQ ID NO:17 and an antisense strand comprising a nucleotide sequence comprising at least 15 contiguous nucleotides differing by no more than 3 nucleotides from the corresponding portion of the nucleotide sequence of SEQ ID NO:18,
b) a dsRNA agent comprising a sense strand comprising at least 15 contiguous nucleotides differing by no more than 3 nucleotides from the nucleotide sequence of SEQ ID NO:19 and an antisense strand comprising a nucleotide sequence comprising at least 15 contiguous nucleotides differing by no more than 3 nucleotides from the corresponding portion of the nucleotide sequence of SEQ ID NO:20,
c) a dsRNA agent comprising an antisense comprising a nucleotide sequence selected from the group consisting of any of the antisense strand nucleotide sequences in any one of Tables 2, 3, 10A, 10C, 11, and 12;
d) a dsRNA agent comprising a sense strand comprising at least 15 contiguous nucleotides differing by no more than three nucleotides from nucleotides 27573296-27573318; 27573314-27573336; 27573319-27573341; 27573562-27573584; 27573585-27573607; 27573592-27573614; 27573599-27573621; 27573608-27573630; 27573616-27573638; 27573619-27573641; 27573622-27573644; 27573633-27573655; 27573690-27573712; or 27573717-27573739 of SEQ ID NO: 13; and
e) a dsRNA agent comprising a sense strand comprising at least 15 contiguous nucleotides differing by no more than three nucleotides from any one of the nucleotide sequence of nucleotides 27573296-27573584; 27573296-27573575; 27573301-27573338; 27573318-27573342; 27573555-27573583; 27573581-27573607; 27573584-27573607; 27573588-27573671; 27573588-27573666; 27573588-27573624; 27573592-27573624; 27573592-27573617; 27573598-27573624; 27573599-27573623; 27573606-27573655; 27573606-27573652; 27573606-27573647; 27573654-27573712; or 27573707-27573740 of SEQ ID NO: 13, and an antisense strand comprising at least 15 contiguous nucleotides from the corresponding nucleotide sequence of SEQ ID NO:14; and
wherein a second dsRNA agent targeting the sense strand of C9orf72 is selected from the group consisting of
a) a dsRNA agent comprising a sense strand comprising at least 15 contiguous nucleotides differing by no more than 3 nucleotides from the nucleotide sequence of SEQ ID NO:1 and an antisense strand comprising a nucleotide sequence comprising at least 15 contiguous nucleotides differing by no more than 3 nucleotides from the corresponding portion of the nucleotide sequence of SEQ ID NO:5,
b) a dsRNA agent comprising a sense strand comprising at least 15 contiguous nucleotides differing by no more than 3 nucleotides from the nucleotide sequence of SEQ ID NO:15 and an antisense strand comprising a nucleotide sequence comprising at least 15 contiguous nucleotides differing by no more than 3 nucleotides from the corresponding portion of the nucleotide sequence of SEQ ID NO:16,
c) a dsRNA agent comprising an antisense strand comprising at least 15 contiguous nucleotides differing by no more than 3 nucleotides from any one of the antisense nucleotide sequences in any one of Tables 5, 6, 10B, and 10D;
d) a dsRNA agent comprising a sense strand comprising at least 15 contiguous nucleotides differing by no more than three nucleotides from any one of the nucleotide sequence of nucleotides 1-23; 15-37; 33-55; 37-59; 59-81; 62-84, or 69-91 of SEQ ID NO: 1, and an antisense strand comprising at least 15 contiguous nucleotides from the corresponding nucleotide sequence of SEQ ID NO:5;
e) a dsRNA agent comprising a sense strand comprising at least 15 contiguous nucleotides differing by no more than three nucleotides from any one of the nucleotide sequence of nucleotides 5197-5219; 5213-5235; 5223-5245; 5226-5248; 5227-5249; 5228-5250, 5229-5251, 5230-5252, 5231-5253, 5233-5255; 5235-5256, 5241-5263; 5245-5267; 5233-5255; 5248-5270; 5539-5561; 5547-5569; 5917-5939; 5936-5958; 5954-5976; 6008-6030; 6021-6043; 6036-6058; 6043-6065; or 6048-6070 of SEQ ID NO: 15, and an antisense strand comprising at least 15 contiguous nucleotides from the corresponding nucleotide sequence of SEQ ID NO: 16;
f) a dsRNA agent comprising a sense strand comprising at least 15 contiguous nucleotides differing by no more than three nucleotides from any one of the nucleotide sequence of nucleotides 5015-5052; 5017-5040; 5032-5059; 5032-5055; 5033-5055; 5035-5059; 5036-5059; 5058-5087; 5059-5087; 5059-5084; 5064-5087; 5197-5222; 5213-5267; 5223-5252; 5229-5252; 5233-5263; 5516-5570; 5539-5565; 5539-5562; 5545-5570; 5545-5569; 5593-5616; 5883-5950; 5917-5950; 5919-5950; 5923-5950; 5934-5977; 5934-5957; 5938-5977; 5938-5965; 5938-5961; 5947-5977; 5947-5973; 5972-6001; 5973-5997; 6006-6029; 6011-6070; 6011-6039; 6011-6038; 6015-6038; 6019-6045; 6019-6042; 6033-6070; 6035-6065; 6035-6059; or 6040-6063 of SEQ ID NO: 15, and an antisense strand comprising at least 15 contiguous nucleotides from the corresponding nucleotide sequence of SEQ ID NO:16;
g) a dsRNA agent comprising a sense strand comprising at least 15 contiguous nucleotides differing by no more than three nucleotides from any one of the nucleotide sequence of nucleotides 15-52; 17-40; 32-59; 32-55; 35-59; 36-59; 58-87; 59-87; 59-84; or 64-87 of SEQ ID NO: 1, and an antisense strand comprising at least 15 contiguous nucleotides from the corresponding nucleotide sequence of SEQ ID NO:5; and
h) a dsRNA agent comprising an antisense strand comprising at least 15 contiguous nucleotides differing by no more than 3 nucleotides from any one of the antisense nucleotide sequences in any one of Tables 8 and 9; and
wherein the sense strand, the antisense strand, or both the sense strand and the antisense strand of the first dsRNA, the second dsRNA agent, or both the first and second dsRNA agent comprises at least one modified nucleotide.

92-97. (canceled)

98. The composition of claim 91, wherein
a) the first dsRNA agent comprises an antisense strand comprising a nucleotide sequence comprising at least 15 contiguous nucleotides differing by no more than 3 nucleotides from the antisense sequence of AD-1446213; and the second dsRNA agent comprises an antisense strand comprising a nucleotide sequence comprising at least 15 contiguous nucleotides differing by no more than 3 nucleotides from the antisense sequence of AD-1285238;
b) the first dsRNA agent comprises an antisense strand comprising a nucleotide sequence comprising at least 15 contiguous nucleotides differing by no more than 3 nucleotides from the antisense sequence of AD-1446213; and the second dsRNA agent comprises an antisense strand comprising a nucleotide sequence comprising at least 15 contiguous nucleotides differing by no more than 3 nucleotides from the antisense sequence of AD-1285234;
c) the first dsRNA agent comprises an antisense strand comprising a nucleotide sequence comprising at least 15 contiguous nucleotides differing by no more than 3 nucleotides from the antisense sequence of AD-1446246; and the second dsRNA agent comprises an antisense strand comprising a nucleotide sequence comprising at least 15 contiguous nucleotides differing by no more than 3 nucleotides from the antisense sequence of AD-1285238;
d) the first dsRNA agent comprises an antisense strand comprising a nucleotide sequence comprising at least 15 contiguous nucleotides differing by no more than 3 nucleotides from the antisense sequence of AD-1446246; and the second dsRNA agent comprises an antisense strand comprising a nucleotide sequence comprising at least 15 contiguous nucleotides differing by no more than 3 nucleotides from the antisense sequence of AD-1285234;
e) the first dsRNA agent comprises an antisense strand comprising a nucleotide sequence comprising at least 15 contiguous nucleotides differing by no more than 3 nucleotides from the antisense sequence of AD-1446268; and the second dsRNA agent comprises an antisense strand comprising a nucleotide sequence comprising at least 15 contiguous nucleotides differing by no more than 3 nucleotides from the antisense sequence of AD-1285238;
f) the first dsRNA agent comprises an antisense strand comprising a nucleotide sequence comprising at least 15 contiguous nucleotides differing by no more than 3 nucleotides from the antisense sequence of AD-1446268; and the second dsRNA agent comprises an antisense strand comprising a nucleotide sequence comprising at least 15 contiguous nucleotides differing by no more than 3 nucleotides from the antisense sequence of AD-1285234.

99. (canceled)

100. The composition of claim 91, wherein the first dsRNA, the second dsRNA agent, or both the first and second dsRNA agents is conjugated to one or more lipophilic moieties.

101. The composition of claim 91, wherein the lipophilic moiety is conjugated to one or more internal positions in the double stranded region of the first dsRNA agent, the second dsRNA agent or both the first and second dsRNA agent.

102-106. (canceled)

107. The composition of claim 91, wherein all of the nucleotides of the sense strand and all of the nucleotides of the antisense strand of the first dsRNA agent, the second dsRNA agent or both the first and second dsRNA agent are modified nucleotides.

108. The composition of claim 91, wherein at least one of the nucleotide modifications is selected from the group consisting of a deoxy-nucleotide modification, a 3′-terminal deoxy-thymine (dT) nucleotide modification, a 2′—O-methyl nucleotide modification, a 2′-fluoro nucleotide modification, a 2′-deoxy nucleotide modification, a 2′—O-hexadecyl nucleotide modification, a 2′-phosphate nucleotide modification, a 2′-5′-linked ribonucleotide (3′-RNA) modification, a locked nucleotide modification, an unlocked nucleotide modification, a conformationally restricted nucleotide modification, a constrained ethyl nucleotide modification, an abasic nucleotide modification, an inverted abasic residue modification, a 2′-amino nucleotide modification, a 2′—O-allyl nucleotide modification, 2′-C-alkyl nucleotide modification, 2′-hydroxy nucleotide modification, a 2′-methoxyethyl nucleotide modification, a 2′—O-alkyl nucleotide modification, 2′,3′-seco nucleotide modification, a morpholino nucleotide modification, a phosphoramidate modification, a non-natural base comprising nucleotide modification, a tetrahydropyran nucleotide modification, a 1,5-anhydrohexitol nucleotide modification, a cyclohexenyl nucleotide modification, a nucleotide comprising a 5′-phosphorothioate group modification, a nucleotide comprising a 5′-methylphosphonate group modification, a nucleotide comprising a 5′ phosphate or 5′ phosphate mimic modification, a nucleotide comprising vinyl phosphonate modification, a nucleotide comprising glycol nucleic acid (GNA) modification, a nucleotide comprising a glycol nucleic acid S-Isomer (S-GNA) modification, a nucleotide comprising 2-hydroxymethyl-tetrahydrofuran-5-phosphate modification, a nucleotide comprising 2′-deoxythymidine-3′phosphate modification, a nucleotide comprising 2′-deoxyguanosine-3′-phosphate modification, and a terminal nucleotide linked to a cholesteryl derivative and a dodecanoic acid bisdecylamide group modification; and combinations thereof.

109-111. (canceled)

112. The composition of claim 91, wherein the first dsRNA agent, the second dsRNA agent or both the first and second dsRNA agents comprise at least one phosphorothioate internucleotide linkage.

113. (canceled)

114. The composition of claim 91, wherein each strand of the first dsRNA agent, the second dsRNA agent or both the first and second dsRNA agents is no more than 30 nucleotides in length.

115. (canceled)

116. (canceled)

117. The composition of claim 91, wherein the double stranded region of the first dsRNA agent, the second dsRNA agent or both the first and second dsRNA agent is 15-30 nucleotide pairs in length.

118-135. (canceled)

136. The composition of claim 101, wherein the one or more lipophilic moieties are conjugated to one or more of the internal positions of the first dsRNA agent, the second dsRNA agent or both the first and second dsRNA agents selected from the group consisting of positions 4-8 and 13-18 on the sense strand, and positions 6-10 and 15-18 on the antisense strand, counting from the 5′-end of each strand.

137-145. (canceled)

146. The composition of claim 101, wherein the lipophilic moiety contains a saturated or unsaturated C4-C30 hydrocarbon chain, and an optional functional group selected from the group consisting of hydroxyl, amine, carboxylic acid, sulfonate, phosphate, thiol, azide, and alkyne.

147-162. (canceled)

163. The composition of claim 91, wherein the first dsRNA agent, the second dsRNA agent or both the first and second dsRNA agents further comprises a phosphate or phosphate mimic at the 5′-end of the antisense strand.

164.-166. (canceled)

167. A cell containing the composition of claim 91.

168. (canceled)

169. (canceled)

170. A method of reducing the level of one or more C9orf72 RNA transcripts in a cell, the method comprising contacting the cell with any one or more of the dsRNA agents of claim 1, thereby inhibiting expression of C9orf72 in the cell.

171-180. (canceled)

181. A method of treating a subject having a disorder that would benefit from reduction in C9orf72 expression, comprising administering to the subject a therapeutically effective amount of any one or more of the dsRNA agents of claim 1, thereby treating the subject having the disorder that would benefit from reduction in C9orf72 expression.

182. (canceled)

183. The method of claim 181, wherein the disorder is a C9orf72-associated disorder.

184-197. (canceled)

198. A kit, a vial, or a syringe comprising any one or more of the dsRNA agents of claim 1.

199. (canceled)

200. (canceled)
